(19) United States
(12) Patent Application Publication
(10) Pub. No.: US 2002/0151681 A1
(43) Pub. Date: Oct. 17, 2002

(54) Nucleic acids, proteins and antibodies

(76) Inventors: Craig A. Rosen, Laytonsville, MD (US); Steven M. Ruben, Olney, MD (US)

Correspondence Address: HUMAN GENOME SCIENCES INC, 9410 KEY WEST AVENUE, ROCKVILLE, MD, 20850

(21) Appl. No.: 09/925,300

(22) Filed: Aug. 10, 2001

Related U.S. Application Data
(63) Continuation-in-part of application No. PCT/US00/05988, filed on Mar. 8, 2000.
(60) Provisional application No. 60/124,270, filed on Mar. 12, 1999.

(51) Int. Cl. C07K 14/435; C07H 21/04; C12P 21/02; C12N 5/06

(52) U.S. Cl. 530/350; 536/23.5; 435/325; 435/320.1; 435/69.3

(57) ABSTRACT

This invention relates to newly identified prostate or prostate cancer related polynucleotides, the polypeptides encoded by these polynucleotides herein collectively referred to as “prostate cancer antigens,” and to the complete gene sequences associated therewith and to the expression products thereof, and to antibodies that immunospecifically bind these polypeptides, as well as the use of such prostate cancer polynucleotides, antigens, and antibodies for detection, prevention, prognosis, and treatment of disorders of the reproductive system, particularly disorders of the prostate, including, but not limited to, the presence of prostate cancer and prostate cancer metastases. More specifically, isolated prostate cancer nucleic acid molecules are provided encoding novel prostate cancer polypeptides. Novel prostate cancer polypeptides and antibodies that bind to these polypeptides are provided. Also provided are vectors, host cells, and recombinant and synthetic methods for producing human prostate cancer polynucleotides, polypeptides, and/or antibodies. The invention further relates to diagnostic and therapeutic methods useful for diagnosing, treating, preventing and/or prognosing disorders related to the prostate, including prostate cancer, and therapeutic methods for treating such disorders. The invention further relates to screening methods for identifying agonists and antagonists of polynucleotides and polypeptides of the invention. The invention further relates to methods and/or compositions for inhibiting or promoting the production and/or function of the polypeptides of the invention.

### FIELD OF THE INVENTION

[0001] This invention relates to newly identified prostate or prostate cancer related polynucleotides, the polypeptides encoded by these polynucleotides herein collectively referred to as “prostate cancer antigens,” and to the complete gene sequences associated therewith and to the expression products thereof, and to antibodies that immunospecifically bind these polypeptides, as well as the use of such prostate cancer polynucleotides, antigens, and antibodies for detection, prevention, prognosis, and treatment of disorders of the reproductive system, particularly disorders of the prostate, including, but not limited to, the presence of prostate cancer and prostate cancer metastases. More specifically, isolated prostate cancer nucleic acid molecules are provided encoding novel prostate cancer polypeptides. Novel prostate cancer polypeptides and antibodies that bind to these polypeptides are provided. Also provided are vectors, host cells, and recombinant and synthetic methods for producing human prostate cancer polynucleotides, polypeptides, and/or antibodies. The invention further relates to diagnostic and therapeutic methods useful for diagnosing, treating, preventing and/or prognosing disorders related to the prostate, including prostate cancer, and therapeutic methods for treating such disorders. The invention further relates to screening methods for identifying agonists and antagonists of polynucleotides and polypeptides of the invention. The invention further relates to methods and/or compositions for inhibiting or promoting the production and/or function of the polypeptides of the invention.

### BACKGROUND OF THE INVENTION

[0002] The normal prostate gland is quite small, weighing only about one ounce, and comprised of approximately 30% muscular tissue and 70% glandular tissue. The prostate wraps around the urethra, through which urine and semen are carried out to the tip of the penis. The primary function of the prostate is to produce a necessary fluid component of semen; just prior to male orgasm muscular contractions squeeze this fluid into the urethra. Disorders of the prostate gland, such as prostate cancers, are typically manifested by enlargement of the gland, leading to such symptoms as impaired urinary flow, infertility, and pain.

[0003] About 180,000 new cases of prostate cancer in the United States and 16,000 in Canada are diagnosed every year. Cancer of the prostate is now the second most common type of cancer in males, although the causes of prostate cancer are not well understood. While men of any age can develop prostate cancer, it is found most frequently in men over age 50, with risk increasing with age.

[0004] Most prostate cancers are adenocarcinomas, cancers that arise in glandular cells of the prostate's epithelial tissue. Types of prostate cancers also include, but are not limited to, transitional cell carcinomas, ductal carcinomas, and squamous cell carcinomas. Prostate cancers usually progress slowly and produce no symptoms in the initial stages. Eventually, the tumor may enlarge the prostate gland, pressing on the urethra and causing painful or frequent urination and blood in the urine or semen. Sometimes pain in the lower back, pelvis, or upper thighs may signal that prostate cancer cells have spread to the ribs, pelvis, and other bones. The prognosis for prostate cancer is quite good if it is caught and treated early. The five-year survival rate for American men with prostate cancer is almost 93 percent, but this number rises to almost 100 percent if the tumor is caught early.

[0005] Current therapies include watchful waiting, surgery, radiation therapy, and hormone therapy, which may lead to such unpleasant side effects as incontinence, impotence, dry orgasm, pubic hair loss, nausea, breast growth, and decreased libido.

[0006] There are a variety of techniques for early detection and characteristics of prostate cancers, however, none of them are devoid of problems. Because prostate cancer is a notoriously silent disease with few early symptoms, there is an urgent need for identification and characterization of factors that modulate activation and differentiation of prostate cells, both normally and in disease states. In particular, there is a need to isolate and characterize additional molecules that mediate apoptosis, DNA repair, tumor-mediated angiogenesis, genetic imprinting, immune responses to tumors and tumor antigens, among other things, that can play a role in detecting, preventing, ameliorating or correcting dysfunctions or diseases related to the prostate.

[0007] The discovery of new human prostate cancer associated polynucleotides, the polypeptides encoded by them, and antibodies that immunospecifically bind these polypeptides, satisfies a need in the art by providing new compositions which are useful in the diagnosis, treatment, prevention and/or prognosis of disorders of the reproductive system, particularly disorders of the prostate, including, but not limited to, prostate cancers such as adenocarcinoma, transitional cell carcinomas, ductal carcinomas, and squamous cell carcinomas, as well as inflammatory disorders, such as chronic prostatitis, granulomatous prostatitis and malacoplakia, prostatic hyperplasia, and as described under “Hyperproliferative Disorders” and/or “Reproductive System Disorders” below.

### SUMMARY OF THE INVENTION

[0008] The present invention includes isolated nucleic acid molecules comprising, or alternatively, consisting of, a prostate and/or prostate cancer associated polynucleotide sequence disclosed in the sequence listing (as SEQ ID Nos:1 to 940) and/or contained in a human cDNA clone described in Tables 1, 2 and 5 and deposited with the American Type Culture Collection (“ATCC”). Fragments, variant, and derivatives of these nucleic acid molecules are also encompassed by the invention. The present invention also includes isolated nucleic acid molecules comprising, or alternatively consisting of, a polynucleotide encoding a prostate or prostate cancer polypeptide. The present invention further includes prostate and/or prostate cancer polypeptides encoded by these polynucleotides. Further provided for are amino acid sequences comprising, or alternatively consisting of, prostate and/or prostate cancer polypeptides as disclosed in the sequence listing (as SEQ ID Nos: 941 to 1880) and/or encoded by a human cDNA clone described in Tables 1, 2 and 5 and deposited with the ATCC. Antibodies that bind these polypeptides are also encompassed by the invention. Polypeptide fragments, variants, and derivatives of these amino acid sequences are also encompassed by the invention, as are polynucleotides encoding these polypeptides and antibodies that bind these polypeptides. Also provided are diagnostic methods for diagnosing and treating, preventing, and/or prognosing disorders related to the prostate, including prostate cancer, and therapeutic methods for treating such disorders. The invention further relates to screening methods for identifying agonists and antagonists of prostate cancer antigens of the invention.

### DETAILED DESCRIPTION

[0009] Tables

[0010] Table 1 summarizes some of the prostate cancer antigens encompassed by the invention (including contig sequences (SEQ ID NO:X) and the cDNA clone related to the contig sequence) and further summarizes certain characteristics of the prostate cancer polynucleotides and the polypeptides encoded thereby. The first column shows the “SEQ ID NO:” for each of the 940 prostate cancer antigen polynucleotide sequences of the invention. The second column provides a unique “Sequence/Contig ID” identification for each prostate and/or prostate cancer associated sequence. The third column, “Gene Name,” and the fourth column, “Overlap,” provide a putative identification of the gene based on the sequence similarity of its translation product to an amino acid sequence found in a publicly accessible gene database and the database accession no. for the datebase sequence having simularity, respectively. The fifth and sixth columns provide the location (nucleotide position nos. within the contig), “Start” and “End”, in the polynucleotide sequence “SEQ ID NO:X” that delineate the preferred ORF shown in the sequence listing as SEQ ID NO:Y. The seventh and eighth columns provide the “% Id” (percent identity) and “% Si” (percent similarity), respectively, observed between the aligned sequence segments of the translation product of SEQ ID BOX and the database sequence. The ninth column provides a unique “Clone ID” for a cDNA clone related to each contig sequence.

[0011] Table 2 summarizes ATCC Deposit, Deposit dates, and ATCC designation numbers of deposits made with the ATCC in connection with the present application.

[0012] Table 3 indicates public ESTs, of which at least one, two, three, four, five, ten, fifteen or more of any one or more of these public EST sequences are optionally excluded from certain embodiments of the invention.

[0013] Table 4 lists residues comprising antigenic epitopes of antigenic epitope-bearing fragments present in most of the prostate or prostate cancer associated polynucleotides described in Table 1 as predicted by the inventors using the algorithm of Jameson and Wolf, (1988) Comp. Appl. Biosci. 4:181-186. The Jameson-Wolf antigenic analysis was performed using the computer program PROTEAN (Version 3.11 for the Power MacIntosh, DNASTAR, Inc., 1228 South Park Street Madison, Wis.). Prostate and prostate cancer associated polypeptides (e.g., SEQ ID NO:Y, polypeptides encoded by SEQ ID NO:X, or polypeptides encoded by the cDNA in the referenced cDNA clone) may possess one or more antigenic epitopes comprising residues described in Table 4. It will be appreciated that depending on the analytical criteria used to predict antigenic determinants, the exact address of the determinant may vary slightly. The residues and locations shown in column two of Table 4 correspond to the amino acid sequences for most prostate and prostate cancer associated polypeptide sequence shown in the Sequence Listing.

[0014] Table 5 shows the cDNA libraries sequenced, and ATCC designation numbers and vector information relating to these cDNA libraries.

[0015] Definitions

[0016] The following definitions are provided to facilitate understanding of certain terms used throughout this specification.

[0017] In the present invention, “isolated” refers to material removed from its original environment (e.g., the natural environment if it is naturally occurring), and thus is altered “by the hand of man” from its natural state. For example, an isolated polynucleotide could be part of a vector or a composition of matter, or could be contained within a cell, and still be “isolated” because that vector, composition of matter, or particular cell is not the original environment of the polynucleotide. The term “isolated” does not refer to genomic or cDNA libraries, whole cell total or mRNA preparations, genomic DNA preparations (including those separated by electrophoresis and transferred onto blots), sheared whole cell genomic DNA preparations or other compositions where the art demonstrates no distinguishing features of the polynucleotide/sequences of the present invention.

[0018] As used herein, a “polynucleotide” refers to a molecule having a nucleic acid sequence contained in SEQ ID NO:X (as described in column 1 of Table 1) or the related cDNA clone (as described in column 9 of Table 1 and contained within a library deposited with the ATCC). For example, the polynucleotide can contain the nucleotide sequence of the full length cDNA sequence, including the 5′ and 3′ untranslated sequences, the coding region, as well as fragments, epitopes, domains, and variants of the nucleic acid sequence. Moreover, as used herein, a “polypeptide” refers to a molecule having an amino acid sequence encoded by a polynucleotide of the invention as broadly defined (obviously excluding poly-Phenylalanine or poly-Lysine peptide sequences which result from translation of a polyA tail of a sequence corresponding to a cDNA).

[0019] In the present invention, “SEQ ID NO:X” was often generated by overlapping sequence contained in multiple clones (contig analysis). A representative clone containing all or most of the sequence for SEQ ID NO:X is deposited at Human Genome Sciences, Inc. (HGS) in a catalogued and archived library. As shown in column 9 of Table 1, each clone is identified by a cDNA Clone ID. Each Clone ID is unique to an individual clone and the Clone ID is all the information needed to retrieve a given clone from the HGS library. In addition to the individual cDNA clone deposits, most of the cDNA libraries from which the clones were derived were deposited at the American Type Culture Collection (hereinafter “ATCC”). Table 5 provides a list of the deposited cDNA libraries. One can use the Clone ID to determine the library source by reference to Tables 2and 5. Table 5 lists the deposited cDNA libraries by name and links each library to an ATCC Deposit. Library names contain four characters, for example, “HTWE.” The name of a cDNA clone (“Clone ID”) isolated from that library begins with the same four characters, for example “HTWEP07”. As mentioned below, Table 1 correlates the Clone ID names with SEQ ID NOs. Thus, starting with a SEQ ID NO, one can use Tables 1, 2 and 5 to determine the corresponding Clone ID, from which library it came and in which ATCC deposit the library is contained. Furthermore, it is possible to retrieve a given cDNA clone from the source library by techniques known in the art and described elsewhere herein. The ATCC is located at 10801 University Boulevard, Manassas, Va. 20110-2209, USA. The ATCC deposits were made persuant to the terms of the Budapest Treaty on the international recognition of the deposit of microorganisms for the purposes of patent procedure.

[0020] A “polynucleotide” of the present invention also includes those polynucleotide capable of hybridizing, under stringent hybridization conditions, to sequences contained in SEQ ID NO:X, or the complement thereof (e.g., the complement of any one, two, three, four, or more of the polynucleotide fragments described herein), and/or sequences contained in the related cDNA clone within a library deposited with the ATCC. “Stringent hybridization conditions” refers to an overnight incubation at 42 degree C. in a solution comprising 50% formamide, 5×SSC (750 mM trisodium citrate), 50 mM sodium phosphate (pH 7.6), 5×SSC Denhardt's solution, 10% dextran sulfate, and 20 μg/ml denatured, sheared salmon sperm DNA, followed by washing the filters in 0.1×SSC at about 65 degree C.

[0021] Also included within “polynucleotides” of the present invention are nucleic acid molecules that hybridize to the polynucleotides of the present invention at lower stringency hybridization condition. Charges in the stingency of hybridization and signal detection are primarily accomplished through the manipulation of formamide concentration (lower percentages of formamide result in lowered stringency); salt conditions, or temperature. For example, lower stringency conditions include an overnight incubation at 37 degree C. in a solution comprising 6×SSPE (20×SSPE=3M NaCl; 0.2M NaH₂PO₄; 0.02M EDTA, pH 7.4), 0.5% SDS, 30% formamide, 100 ug/ml salmon sperm blocking DNA; followed by washes at 50 degree C. with 1×SSPE, 0.1% SDS. In addition, to achieve even lower stringency, washes performed following stringent hybridization can be done at higher salt concentrations (e.g. 5×SSC).

[0022] Note that variations in the above conditions may be accomplished through the inclusion and/or substitution of alternate blocking reagents used to suppress background in hybridization experiments. Typical blocking reagents include Denhardt's reagent, BLOTTO, heparin, denatured salmon sperm DNA, and commercially available proprietary formulations. The inclusion of specific blocking reagents may require modification of the hybridization conditions described above, due to problems with compatibility.

[0023] Of course, a polynucleotide which hybridizes only to polyA+ sequences (such as any 3′ terminal polyA+ tract of a cDNA shown in the sequence listing), or to a complementary stretch of T (or U) residues, would not be included in the definition of “polynucleotide,” since such a polynucleotide would hybridize to any nucleic acid molecule containing a poly (A) stretch or the complement thereof (e.g., practically any double-stranded cDNA clone generated using oligo dT as a primer).

[0024] The polynucleotides of the present invention can be composed of any polyribonucleotide or polydeoxribonucleotide, which may be unmodified RNA or DNA or modified RNA or DNA. For example, polynucleotides can be composed of single- and double-stranded DNA, DNA that is a mixture of single- and double-stranded regions, single- and double-stranded RNA, and RNA that is mixture of single- and double-stranded regions, hybrid molecules comprising DNA and RNA that may be single-stranded or, more typically, double-stranded or a mixture of single- and double-stranded regions. In addition, the polynucleotide can be composed of triple-stranded regions comprising RNA or DNA or both RNA and DNA. A polynucleotide may also contain one or more modified bases or DNA or RNA backbones modified for stability or for other reasons. “Modified” bases include, for example, tritylated bases and unusual bases such as inosine. A variety of modifications can be made to DNA and RNA; thus, “polynucleotide” embraces chemically, enzymatically, or metabolically modified forms.

[0025] In specific embodiments, the polynucleotides of the invention are at least 15, at least 30, at least 50, at least 100, at least 125, at least 500, or at least 1000 continuous nucleotides but are less than or equal to 300 kb, 200 kb, 100 kb, 50 kb, 15 kb, 10 kb, 7.5 kb, 5 kb, 2.5 kb, 2.0 kb, or 1 kb, in length. In a further embodiment, polynucleotides of the invention comprise a portion of the coding sequences, as disclosed herein, but do not comprise all or a portion of any intron. In another embodiment, the polynucleotides comprising coding sequences do not contain coding sequences of a genomic flanking gene (i.e., 5′ or 3′ to the gene of interest in the genome). In other embodiments, the polynucleotides of the invention do not contain the coding sequence of more than 1000, 500, 250, 100, 50, 25, 20, 15, 10, 5, 4, 3, 2, or 1 genomic flanking gene(s).

[0026] “SEQ ID NO:X” refers to a prostate cancer antigen polynucleotide sequence described in Table 1. SEQ ID NO:X is identified by an integer specified in column 1 of Table 1. The polypeptide sequence SEQ ID NO:Y is a translated open reading frame (ORF) encoded by polynucleotide SEQ ID NO:X. There are 940 prostate cancer antigen polynucleotide sequences described in Table 1 and shown in the sequence listing (SEQ ID NO:1 through SEQ ID NO:940). Likewise there are 940 polypeptide sequences shown in the sequence listing, one polypeptide sequence for each of the polynucleotide sequences (SEQ ID NO:941 through SEQ ID NO:1880). The polynucleotide sequences are shown in the sequence listing immediately followed by all of the polypeptide sequences. Thus, a polypeptide sequence corresponding to polynucleotide sequence SEQ ID NO:1 is the first polypeptide sequence shown in the sequence listing. The second polypeptide sequence corresponds to the polynucleotide sequence shown as SEQ ID NO:2, and so on. In otherwords, since there are 940 polynucleotide sequences, for any polynucleotide sequence SEQ ID NO:X, a corresponding polypeptide SEQ ID NO:Y can be determined by the formula X+940=Y. In addition, any of the unique “Sequence/Contig ID” defined in column 2 of Table 1, can be linked to the corresponding polypeptide SEQ ID NO:Y by reference to Tab;e 4.

[0027] The polypeptides of the present invention can be composed of amino acids joined to each other by peptide bonds or modified peptide bonds, i.e., peptide isosteres, and may contain amino acids other than the 20 gene-encoded amino acids. The polypeptides may be modified by either natural processes, such as posttranslational processing, or by chemical modification techniques which are well known in the art. Such modifications are well described in basic texts and in more detailed monographs, as well as in a voluminous research literature. Modifications can occur anywhere in a polypeptide, including the peptide backbone, the amino acid side-chains and the amino or carboxyl termini. It will be appreciated that the same type of modification may be present in the same or varying degrees at several sites in a given polypeptide. Also, a given polypeptide may contain many types of modifications. Polypeptides may be branched, for example, as a result of ubiquitination, and they may be cyclic, with or without branching. Cyclic, branched, and branched cyclic polypeptides may result from posttranslation natural processes or may be made by synthetic methods. Modifications include acetylation, acylation, ADP ribosylation, amidation, covalent attachment of flavin, covalent attachment of a heme moiety, covalent attachment of a nucleotide or nucleotide derivative, covalent attachment of a lipid or lipid derivative, covalent attachment of phosphotidylinositol, cross-linking, cyclization, disulfide bond formation, demethylation, formation of covalent cross-links, formation of cysteine, formation of pyroglutamate, formylation, gamma-carboxylation, glycosylation, GPI anchor formation, hydroxylation, iodination, methylation, myristoylation, oxidation, pegylation, proteolytic processing, phosphorylation, prenylation, racemization, selenoylation, sulfation, transfer-RNA mediated addition of amino acids to proteins such as arginylation, and ubiquitination. (See, for instance, PROTEINS—STRUCTURE AND MOLECULAR PROPERTIES, 2nd Ed., T. E. Creighton, W. H. Freeman and Company, New York (1993); POSTTRANSLATIONAL COVALENT MODIFICATION OF PROTEINS, B. C. Johnson, Ed., Academic Press, New York, pgs. 1-12 (1983); Seifter et al., Meth Enzymol 182:626-646 (1990); Rattan et al., Ann NY Acad Sci 663:48-62 (1992).)

[0028] The prostate and prostate cancer polypeptides of the invention can be prepared in any suitable manner. Such polypeptides include isolated naturally occurring polypeptides, recombinantly produced polypeptides, synthetically produced polypeptides, or polypeptides produced by a combination of these methods. Means for preparing such polypeptides are well understood in the art.

[0029] The polypeptides may be in the form of the secreted protein, including the mature form, or may be a part of a larger protein, such as a fusion protein (see below). It is often advantageous to include an additional amino acid sequence which contains secretory or leader sequences, pro-sequences, sequences which aid in purification, such as multiple histidine residues, or an additional sequence for stability during recombinant production.

[0030] The prostate and prostate cancer polypeptides of the present invention are preferably provided in an isolated form, and preferably are substantially purified. A recombinantly produced version of a polypeptide, including the secreted polypeptide, can be substantially purified using techniques described herein or otherwise known in the art, such as, for example, by the one-step method described in Smith and Johnson, Gene 67:31-40 (1988). Polypeptides of the invention also can be purified from natural, synthetic or recombinant sources using techniques described herein or otherwise known in the art, such as, for example, antibodies of the invention raised against the polypeptides of the present invention in methods which are well known in the art.

[0031] By a polypeptide demonstrating a “functional activity” is meant, a polypeptide capable of displaying one or more known functional activities associated with a full-length (complete) protein of the invention. Such functional actibities include, but are not limited to, biological activity, antigenicity [ability to bind (or compete with a polypeptide for binding) to an anti-polypeptide antibody], immunogenicity (ability to generate antibody which binds to a specific polypeptide of the invention), ability to form multimers with polypeptides of the invention, and ability to bind to a receptor or ligand for a polypeptide.

[0032] “A polypeptide having functional activity” refers to polypeptides exhibiting activity similar, but not necessarily identical to, an activity of a polypeptide of the present invention, including mature form, as measured in a particular assay, such as, for example a biological assay, with or without dose dependency. In the case where dose dependency does exist, it need not be identical to that of the polypeptide, but rather substantially similar to the dose-dependence in a given activity as compared to the polypeptide of the present invention (i.e., the candidate polypeptide will exhibit greater activity or not more than about 25-fold less and, preferably, not more than about tenfold less activity, and most preferably, not more than about three-fold less activity relative to the polypeptide of the present invention).

[0033] The functional activity of the prostate cancer antigen polypeptides, and fragments, variants derivatives, and analogs thereof, can be assayed by various methods.

[0034] For example, in one embodiment where one is assaying for the ability to bind or compete with full-length polypeptide of the present invention for binding to an antibody to the full length polypeptide antibody, various immunoassays known in the art can be used, including but not limited to, competitive and non-competitive assay systems using techniques such as radioimmunoassays, ELISA (enzyme linked immunosorbent assay), “sandwich” immunoassays, immunoradiometric assays, gel diffusion precipitation reactions, immunodiffusion assays, in situ immunoassays (using colloidal fold, enzyme or radioisotope labels, for example), western blots, precipitation reactions, agglutination assays (e.g., gel agglutination assays, hemagglutination assays), complement fixation assays, immunofluorescence assays, protein A assays, and immunoelectrophoresis assays, etc. In one embodiment, antibody binding is detected by detecting a label on the primary antibody. In another embodiment, the primary antibody is detected by detecting binding of a secondary antibody or reagent to the primary antibody. In a further embodiment, the secondary antibody is labeled. Many means are known in the art for detecting binding in an immunoassay and are within the scope of the present invention.

[0035] In another embodiment, where a ligand is identified, or the ability of a polypeptide fragment, variant or derivative of the invention to multimerize is being evaluated, binding can be assayed, e.g., by means well-known in the art, such as, for example, reducing and non-reducing gel chromatography, protein affinity chromatography, and affinity blotting. See generally, Phizicky, E., et al., Microbiol. Rev. 59:94-123 (1995). In another embodiment, physiological correlates polypeptide of the present invention binding to its substrates (signal transduction) can be assayed.

[0036] In addition, assays described herein (see Examples) and otherwise known in the art may routinely be applied to measure the ability of polypeptides of the present invention and fragments, variants derivatives and analogs thereof to elicit polypeptide related biological activity (either in vitro or in vivo). Other methods will be known to the skilled artisan and are within the scope of the invention.

[0037] Prostate and Prostate Cancer Associated Polynucleotides and Polypeptides of the Invention

[0038] It has been discovered herein that the polynucleotides described in Table 1 are expressed at significantly enhanced levels in human prostate and/or prostate cancer tissues. Accordingly, such polynucleotides, polypeptides encoded by such polynucleotides, and antibodies specific for such polypeptides find use in the prediction, diagnosis, prevention and treatment of prostate related disorders, including prostate cancer as more fully described below.

[0039] Table 1 summarizes some of the polynucleotides encompassed by the invention (including contig sequences (SEQ ID NO:X) and the related cDNA clones) and further summarizes certain characteristics of these prostate and/or prostate cancer associated polynucleotides and the polypeptides encoded thereby.

TABLE 1

| Seq ID | Sequence/ | | | HGS Nucleotide | | % | % | |
|---|---|---|---|---|---|---|---|---|
| No. | Contig ID | Gene Name | Overlap | Start | End | Id | Si | Clone ID |

| | | | | | | | | | |
|---|---|---|---|---|---|---|---|---|---|
| 1 | 574130 | (AJ223500) nidogen-2 [Homo sapiens] Length = | gnl\|PID\|e1237850 | 3 | 716 | 87 | 87 | HOECC56 | |
| | | 1375 | | | | | | | |
| 2 | 637706 | | | 3 | 1025 | | | HJAAT54 | |
| 3 | 638162 | | | 109 | 696 | | | HNTMW23 | |
| 4 | 684310 | | | 10 | 300 | | | HFXJA96 | |
| 5 | 731016 | protease [Human endogenous retrovirus K] | gnl\|PID\|e290663 | 2 | 370 | 66 | 83 | HPLBP54 | |
| | | >sp\|P87892\|P87892 PROTEASE (FRAGMENT). | | | | | | | |
| | | Length = 334 | | | | | | | |
| 6 | 827771 | | | 188 | 322 | | | HPFCR50 | |
| 7 | 828193 | MAGE-3b [Homo sapiens]>gi\|533523 MAGE-6 | gi\|499122 | 237 | 716 | 97 | 97 | HMMBI07 | |
| | | antigen [Homo sapiens]>gnl\|PID\|d1007417 | | | | | | | |
| | | MAGE-6 protein [Homo sapiens] | | | | | | | |
| 8 | 828194 | | | 243 | 401 | | | HPKAA18 | |
| 9 | 828199 | | | 2 | 463 | | | HPJCU04 | |
| 10 | 828221 | put. LAR preprotein (AA-16 to 1881) [Homo | gi\|34267 | 1 | 1326 | 100 | 100 | HWHQP39 | |
| | | sapiens]>pir\|SO3841\|TDHULK leukocyte | | | | | | | |
| | | antigen-related protein precursor-human Length = | | | | | | | |
| | | 1897 | | | | | | | |
| 11 | 828235 | | | 3 | 248 | | | HWBBB77 | |
| 12 | 828236 | Gu protein [Homo sapiens]>pir\|PC6010\|PC6010 | gi\|1230564 | 1 | 1425 | 84 | 84 | HWBDP29 | |
| | | RNA helicase Gu-human (fragment) | | | | | | | |
| | | >sp\|Q13436\|Q13436 NUCLEOLAR RNA | | | | | | | |
| | | HELICASE GU (FRAGMENT). Length = 801 | | | | | | | |
| 13 | 828237 | | | 3 | 779 | | | HWHPW78 | |
| 14 | 828239 | (AC002451) pyruvate dehydrogenase kinase | gi\|2337883 | 2 | 433 | 87 | 87 | HWACS81 | |
| | | isoform 4 [Homo sapiens]>gi\|1399197 pyruvate | | | | | | | |
| | | debydrogenase kinase isoform 4 [Homo sapiens] | | | | | | | |
| 15 | 828242 | (AF044321) cytochrome c oxidase assembly | gi\|3170264 | 3 | 731 | 100 | 100 | HWBAS37 | |
| | | protein COX11 [Homo sapiens]>gi\|3170264 | | | | | | | |
| | | (AF044321) cytochrome c oxidase assembly | | | | | | | |
| | | protein COX11 [Homo sapiens] | | | | | | | |
| 16 | 828247 | (AF109906) NG22 [Mus musculus] Length = | gi\|3986770 | 3 | 554 | 39 | 61 | HWBBX45 | |
| | | 707 | | | | | | | |
| 17 | 828248 | M1 subunit of ribonucleotide reductase [Homo | gi\|36065 | 254 | 625 | 82 | 82 | HWBAJ23 | |
| | | sapiens]>gi\|36153 large subunit ribonucleotide | | | | | | | |
| | | reductase [Homo sapiens]>pir\|S16680\|S16680 | | | | | | | |
| | | ribonucleoside-diphosphate reductase (EC | | | | | | | |
| | | 1.17.4.1) chain M1-human Length = 792 | | | | | | | |
| 18 | 828250 | | | 58 | 408 | | | HWBBN56 | |
| 19 | 828256 | put. ribosomal protein L3 (AA 1-348) [Homo | gi\|34754 | 393 | 1193 | 94 | 94 | HUSGZ25 | |
| | | sapiens]>pir\|A27294\|R5HUL3 ribosomal protein | | | | | | | |
| | | L3 precursor, mitochondrial-human Length = | | | | | | | |
| | | 348 | | | | | | | |
| 20 | 828267 | | | 3 | 497 | | | HUSIK57 | |
| 21 | 828269 | | | 214 | 492 | | | HUSBF75 | |
| 22 | 828272 | | | 89 | 607 | | | HUSYB27 | |
| 23 | 828273 | (AF047020) alpha-methylacyl-CoA racemase | gi\|2896148 | 300 | 539 | 79 | 89 | HULCJ25 | |
| | | [Homo sapiens]>sp\|O43673\|O43673 ALPHA- | | | | | | | |
| | | METHYLACYL-COA RACEMASE (EC | | | | | | | |
| | | 5.1.99.4). Length = 380 | | | | | | | |
| 24 | 828290 | | | 648 | 914 | | | HUSGH59 | |
| 25 | 828326 | Ki antigen [Mus musculus]>gnl\|PID\|d1029778 | gnl\|PID\|d1022900 | 2 | 970 | 99 | 99 | HTXJJ72 | |
| | | (AB007139) PA28 gamma subunit [Mus | | | | | | | |
| | | musculus]>sp\|O35563\|O35563 KI ANTIGEN. | | | | | | | |
| | | Length = 254 | | | | | | | |
| 26 | 828397 | | | 1 | 942 | | | HLYCG48 | |
| 27 | 828405 | smooth muscle myosin light chain kinase, | bbs\|175341 | 37 | 579 | 98 | 100 | HLDBK03 | |
| | | smMLCK {C-terminal} [sheep, myometrial | | | | | | | |
| | | tissue, day 127 of gestation, Peptide Partial, 438 | | | | | | | |
| | | aa] [Ovis aries]Length = 438 | | | | | | | |
| 28 | 828461 | fra-1 gene product (AA 1-271) [Homo sapiens] | gi\|31463 | 1 | 873 | 71 | 71 | HSKEI92 | |
| | | >pir\|S15750\|S15750 transforming protein (fra-1)- | | | | | | | |
| | | human >sp\|P15407\|FRA1_HUMAN FOS- | | | | | | | |
| | | RELATED ANTIGEN 1. Length = 271 | | | | | | | |
| 29 | 828482 | Gephyrin [Rattus norvegicus] | gi\|56312 | 2 | 940 | 98 | 98 | HSIGE72 | |
| | | >pir\|JH0681\|JH0681 gephyrin-rat | | | | | | | |
| | | >sp\|Q03555\|GEPH_RAT GEPHYRIN | | | | | | | |
| | | (PUTATIVE GLYCINE RECEPTOR-TUBULIN | | | | | | | |
| | | LINKER PROTEIN). Length = 736 | | | | | | | |
| 30 | 828488 | | | 64 | 189 | | | HSDJR78 | |
| 31 | 828491 | | | 386 | 586 | | | HSDFC18 | |
| 32 | 828492 | | | 51 | 212 | | | HSDGQ64 | |
| 33 | 828494 | | | 428 | 733 | | | HSDIC05 | |
| 34 | 828496 | BS4 peptide [Mus musculus] | gi\|863014 | 3 | 1097 | 85 | 93 | HSBAY13 | |
| | | >sp\|P54729\|BS4_MOUSE BS4 PROTEIN. | | | | | | | |
| | | Length = 677 | | | | | | | |
| 35 | 828498 | 14.5 kDa translational inhibitor protein, p14.5 | gnl\|PID\|e1240168 | 63 | 500 | 100 | 100 | HSDXA60 | |
| | | [Homo sapiens] Length = 137 | | | | | | | |
| 36 | 828504 | | | 173 | 412 | | | HSAAQ28 | |
| 37 | 828507 | | | 286 | 462 | | | HSBCA90 | |
| 38 | 828512 | CCAAT-box-binding factor [Homo sapiens] | gi\|179969 | 3 | 611 | 82 | 82 | HSAAV04 | |
| | | >pir\|A36368\|A36368 transcription factor CBF, | | | | | | | |
| | | CCAAT-binding-human | | | | | | | |
| 39 | 828516 | histone H2A [Homo sapiens]>gi\|2062704 | gnl\|PID\|e268230 | 36 | 458 | 100 | 100 | HSBAL82 | |
| | | histone 2A-like protein [Homo sapiens] | | | | | | | |
| | | >gi\|2088554 histone 2A-like protein [Homo | | | | | | | |
| | | sapiens] | | | | | | | |
| 40 | 828519 | | | 142 | 474 | | | HRGBO34 | |
| 41 | 828521 | DEAD box-like RNA helicase [Arabidopsis | gnl\|PID\|e1316345 | 31 | 531 | 38 | 58 | HRGDE67 | |
| | | thaliana]>sp\|O23251\|O23251 DEAD BOX- | | | | | | | |
| | | LIKE RNA HELICASE (FRAGMENT). Length = | | | | | | | |
| | | 450 | | | | | | | |
| 42 | 828522 | Unknown | | 361 | 684 | | | HROBP89 | |
| 43 | 828525 | cytokine receptor [Homo sapiens] | gi\|632974 | 14 | 463 | 99 | 99 | HRGTJ13 | |
| | | >sp\|Q1421\|Q14213 CYTOKINE RECEPTOR | | | | | | | |
| | | PRECURSOR. | | | | | | | |
| 44 | 828529 | | | 379 | 852 | | | HROEB35 | |
| 45 | 828530 | | | 134 | 253 | | | HRACZ50 | |
| 46 | 828536 | | | 84 | 272 | | | HPYSC02 | |
| 47 | 828537 | | | 1 | 270 | | | HPZAA72 | |
| 48 | 828539 | | | 130 | 279 | | | HPWDG48 | |
| 49 | 828540 | ORF_f506 [Escherichia coli]>gi\|1789453 | gi\|882594 | 3 | 278 | 100 | 100 | HPWCG66 | |
| | | (AE000389) aerotaxis sensor receptor, | | | | | | | |
| | | flavoprotein [Escherichia coli] | | | | | | | |
| 50 | 828542 | | | 366 | 626 | | | HRAAA23 | |
| 51 | 828543 | (AF093263) homer-2a [Homo sapiens] | gi\|3834617 | 3 | 554 | 96 | 97 | HPWCS14 | |
| | | >sp\|G3834617\|G3834617 HOMER-2A. Length = | | | | | | | |
| | | 343 | | | | | | | |
| 52 | 828544 | | | 277 | 474 | | | HPWDE02 | |
| 53 | 828546 | | | 1 | 1302 | | | HPWBZ53 | |
| 54 | 828550 | | | 61 | 147 | | | HPWBR44 | |
| 55 | 828551 | | | 61 | 585 | | | HPWCG88 | |
| 56 | 828553 | prostate- specific membrane antigen [Homo | gi\|190664 | 2 | 655 | 95 | 95 | HPWCG57 | |
| | | sapiens]>pir\|A56881\|A56881 prostate-specific | | | | | | | |
| | | membrane antigen-human | | | | | | | |
| 57 | 828557 | NF-IL6-beta protein [Homo sapiens] | gi\|189176 | 3 | 359 | 100 | 100 | HPTVR29 | |
| | | >pir\|A40225\|A40225 transcription activator NF- | | | | | | | |
| | | IL6 beta-human Length = 269 | | | | | | | |
| 58 | 828560 | T-cell receptor (V-J-C) precursor [Homo sapiens] | gi\|339400 | 381 | 683 | 100 | 100 | HPWAY42 | |
| | | >pir\|A26659\|A26659 T-cell receptor gamma-1 | | | | | | | |
| | | chain C region-human {SUB 138-310} | | | | | | | |
| | | >gi\|339080 T cell receptor gamma chain [Homo | | | | | | | |
| | | sapiens] {SUB 139-310}>gi\|339089 T-cell | | | | | | | |
| | | receptor gamma-chain constant region [Ho | | | | | | | |
| 59 | 828561 | zinc finger protein [Homo sapiens] | gi\|498725 | 1 | 204 | 96 | 96 | HPWBS62 | |
| | | >pir\|S47071\|S47071 finger protein HZF3, | | | | | | | |
| | | Krueppel-related-human (fragment) | | | | | | | |
| 60 | 828565 | | | 3 | 962 | | | HPWAZ16 | |
| 61 | 828566 | | | 1214 | 1423 | | | HPWAJ41 | |
| 62 | 828567 | | | 204 | 440 | | | HPRTP24 | |
| 63 | 828568 | thyroid receptor interactor [Homo sapiens] | gi\|703112 | 2 | 475 | 97 | 100 | HPRSB55 | |
| | | Length = 286 | | | | | | | |
| 64 | 828569 | envelope protein [Woodchuck hepatitis B virus] | gi\|336133 | 204 | 395 | 38 | 47 | HPWBR81 | |
| | | >pir\|A03708\|SAVLC2 large surface antigen- | | | | | | | |
| | | woodchuck hepatitis virus (clone 2) Length = 431 | | | | | | | |
| 65 | 828570 | | | 380 | 580 | | | HPRTH40 | |
| 66 | 828571 | DY3.6 [Caenorhabditis elegans] | gnl\|PID\|e1345081 | 2 | 670 | 27 | 61 | HPRTP80 | |
| | | >sp\|O45323\|O45323 DY3.6 PROTEIN.Length = | | | | | | | |
| | | 379 | | | | | | | |
| 67 | 828574 | rTSbeta [Homo sapiens]>sp\|Q15407\|Q15407 | gnl\|PID\|e189422 | 3 | 458 | 89 | 89 | HPRTS71 | |
| | | RTSBETA. Length =416 | | | | | | | |
| 68 | 828575 | | | 3 | 209 | | | HPRTI65 | |
| 69 | 828577 | | | 135 | 395 | | | HPRTQ68 | |
| 70 | 828578 | phospholipase A2 [unidentified]>gi\|t90887 | gi\|833246 | 136 | 627 | 89 | 89 | HPFCL59 | |
| | | synovial phospholipase A-2 [Homo sapiens] | | | | | | | |
| | | >gi\|190889 synovial phospholipase A-2 (EC | | | | | | | |
| | | 3.1.1.4) [Homo sapiens]>pir\|A32862\|PSHUYF | | | | | | | |
| | | phospholipase A2 (EC 3.1.1.4) precursor, | | | | | | | |
| | | synovial fluid-human | | | | | | | |
| | | >sp\|P14555\|PA2M_HUMAN | | | | | | | |
| 71 | 828580 | | | 2 | 340 | | | HPRCS86 | |
| 72 | 828581 | | | 103 | 339 | | | HPRSB02 | |
| 73 | 828583 | | | 258 | 419 | | | HPRTL26 | |
| 74 | 828585 | HOXB13 [Homo sapiens] Length = 284 | gi\|1764090 | 1 | 285 | 100 | 100 | HPRCN60 | |
| 75 | 828587 | (AF043431) retinoblastoma-interacting protein | gi\|3452281 | 139 | 534 | 100 | 100 | HPRCF61 | |
| | | [Homo sapiens]>sp\|O75371\|O75371 | | | | | | | |
| | | RETINOBLASTOMA-INTERACTING | | | | | | | |
| | | PROTEIN. Length = 897 | | | | | | | |
| 76 | 828590 | | | 120 | 248 | | | HPRCE51 | |
| 77 | 828592 | breakpoint cluster region protein [Homo sapiens] | gi\|487346 | 48 | 611 | 98 | 98 | HPRCF63 | |
| | | >sp\|Q12844\|Q12844 BREAKPOINT CLUSTER | | | | | | | |
| | | REGION PROTEIN (FRAGMENT). Length = | | | | | | | |
| | | 889 | | | | | | | |
| 78 | 828593 | XP-G factor [Homo sapiens]>pir\|S35993\|S3S993 | gi\|298111 | 1 | 1272 | 87 | 87 | HPRTJ39 | |
| | | DNA repair protein XPGC-human | | | | | | | |
| | | >sp\|G303059\|G303059 XPGC=DNA REPAIR | | | | | | | |
| | | PROTEIN RAD2 HOMOLOG. {SUB 1166- | | | | | | | |
| | | 1186} Length = 118 | | | | | | | |
| 79 | 828594 | | | 84 | 353 | | | HPRCM59 | |
| 80 | 828596 | homeobox protein [Homo sapiens] | gi\|35315 | 1 | 213 | 93 | 93 | HPRCH15 | |
| | | >pir\|S19010\|S19010 homeotic, protein PBX3a- | | | | | | | |
| | | human >sp\|P40426\|PBX3_HUMAN PRE-B- | | | | | | | |
| | | CELL LEUKEMIA TRANSCRIPTION | | | | | | | |
| | | FACTOR-3 (HOMEOBOX PROTEIN PBX3). | | | | | | | |
| | | Length = 434 | | | | | | | |
| 81 | 828597 | (AL031532) yeast gtr2 homolog, novel small | gnl\|PID\|e1319429 | 1 | 903 | 70 | 85 | HPRBB67 | |
| | | GTPase subfamily protein [Schizosaccharomyces | | | | | | | |
| | | pombe]>sp\|O74544\|O74544 YEAST GTR2 | | | | | | | |
| | | HOMOLOG, NOVEL SMALL GTPASE | | | | | | | |
| | | SUBFAMILY PROTEIN. Length = 31 | | | | | | | |
| 82 | 828598 | | | 1 | 108 | | | HPRAX93 | |
| 83 | 828601 | | | 2 | 520 | | | HPRTI75 | |
| 84 | 828605 | | | 383 | 601 | | | HPRAY38 | |
| 85 | 828608 | acid phosphatase [Homo sapiens] Length = 386 | gi\|189619 | 21 | 533 | 95 | 96 | HPRBF14 | |
| 86 | 828609 | prostate-specific membrane antigen [Homo | gi\|190664 | 186 | 899 | 100 | 100 | HPRBH58 | |
| | | sapiens]>pir\|A56881\|A56881 prostate-specific | | | | | | | |
| | | membrane antigen-human | | | | | | | |
| 87 | 828610 | seminal plasma protein precursor [Homo sapiens] | gi\|338415 | 3 | 398 | 100 | 100 | HPRTJ08 | |
| | | >gi\|514372 beta-microseminoprotein [Homo | | | | | | | |
| | | sapiens]>gi\|825707 prostatic secretory protein | | | | | | | |
| | | (PSP-94) [Homo sapiens] | | | | | | | |
| 88 | 828617 | | | 3 | 350 | | | HPRAD26 | |
| 89 | 828620 | prostatic acid phosphatase [Homo sapiens] | gi\|189613 | 3 | 650 | 94 | 94 | HPRBF16 | |
| | | >gi\|189621 acid phosphatase [Homo sapiens] | | | | | | | |
| | | >gi\|515997 prostatic acid phosphatase [Homo | | | | | | | |
| | | sapiens] | | | | | | | |
| 90 | 828621 | | | 4 | 126 | | | HPRAG37 | |
| 91 | 828622 | | | 28 | 156 | | | HPRAQ51 | |
| 92 | 828623 | | | 125 | 313 | | | HPRAG59 | |
| 93 | 828625 | | | 87 | 275 | | | HPRAT22 | |
| 94 | 828632 | | | 68 | 406 | | | HPQBV63 | |
| 95 | 828635 | | | 916 | 1344 | | | HPMGE79 | |
| 96 | 828637 | (AC005600) PKD1 [Homo sapiens] | gi\|3522923 | 1 | 366 | 70 | 71 | HPOAB53 | |
| | | | | >sp\|O75276\|O75276 PKD1 (FRAGMENT). | | | | | |
| | | | | Length = 1339 | | | | | |
| 97 | 828639 | | | 72 | 158 | | | HPMDB85 | |
| 98 | 828645 | | | 2 | 313 | | | HPJCK50 | |
| 99 | 828648 | (AE059569) actin binding protein MAYVEN | gi\|3789797 | 210 | 677 | 32 | 48 | HPJBV55 | |
| | | [Homo sapiens]>sp\|G3789797\|G3789797 | | | | | | | |
| | | ACTIN BINDING PROTEIN MAYVEN. Length = | | | | | | | |
| | | 593 | | | | | | | |
| 100 | 828649 | neuropeptide Y [Homo sapiens]>gi\|189282 | gi\|189274 | 121 | 375 | 100 | 100 | HPWBU56 | |
| | | neuropeptide Y [Homo sapiens]>gi\|2992498 | | | | | | | |
| | | (AC004485) neuropeptide Y precursor [Homo | | | | | | | |
| | | sapiens] | | | | | | | |
| 101 | 828651 | similar to ATPases associated with various | gnl\|PID\|e1351769 | 41 | 742 | 51 | 69 | HPJDA05 | |
| | | cellular activities (AAA); | | | | | | | |
| 102 | 828652 | | | 1 | 189 | | | HPJCY65 | |
| 103 | 828655 | | | 60 | 251 | | | HPJBW32 | |
| 104 | 828657 | (AF061283) neuronal protein 4.1 [Mus | gi\|3790545 | 38 | 328 | 45 | 67 | HPJBD30 | |
| | | musculus]>sp\|G3790545\|G3790545 | | | | | | | |
| | | NEURONAL PROTEIN 4.1. Length = 879 | | | | | | | |
| 105 | 828660 | | | 103 | 231 | | | HPJCL80 | |
| 106 | 828663 | calnexin [Homo sapiens]>gi\|186523 calnexin | gi\|306481 | 41 | 703 | 87 | 87 | HPJCT42 | |
| | | [Homo sapiens]>pir\|A46673\|A46673 calnexin | | | | | | | |
| | | precursor-human >sp\|P27824\|CALX_HUMAN | | | | | | | |
| | | CALNEXIN PRECURSOR (MAJOR | | | | | | | |
| | | HISTOCOMPATIBILITY COMPLEX CLASS I | | | | | | | |
| | | ANTIGEN-BINDING PROTEIN P88) (P90) | | | | | | | |
| | | (IP90). Length = 592 | | | | | | | |
| 107 | 828666 | | | 1 | 246 | | | HPJBI71 | |
| 108 | 828668 | | | 61 | 315 | | | HPJBK31 | |
| 109 | 828669 | | | 1 | 225 | | | HPJBU60 | |
| 110 | 828670 | | | 222 | 350 | | | HPICC36 | |
| 111 | 828671 | (AJ005866) Sqv-7-like protein [Homo sapiens] | gnl\|PID\|e1360006 | 3 | 1025 | 89 | 90 | HPJAD23 | |
| | | >sp\|E1360006\|E1360006 SQV-7-LIKE | | | | | | | |
| | | PROTEIN (FRAGMENT). Length = 261 | | | | | | | |
| 112 | 828672 | | | 1 | 255 | | | HPICD86 | |
| 113 | 828675 | MCM4 [Homo sapiens] | gi\|2754697 | 2 | 2173 | 99 | 99 | HPJBZ66 | |
| | | >sp\|G2754697\|G2754697 MCM4 | | | | | | | |
| | | (FRAGMENT). Length = 712 | | | | | | | |
| 114 | 828677 | | | 113 | 268 | | | HPICC05 | |
| 115 | 828678 | SNAP43 [Homo sapiens]>gi\|1174203 PSE- | gi\|623244 | 2 | 664 | 98 | 98 | HPJAA76 | |
| | | binding factor PTF gamma subunit [Homo | | | | | | | |
| | | sapiens]>pir\|JC6081\|JC6081 proximal sequence | | | | | | | |
| | | element-binding transcription factor gamma | | | | | | | |
| | | chain-human >sp\|Q16533\|Q16533 PSE- | | | | | | | |
| | | BINDING FACTOR PTF GAMMA SUBUNIT. | | | | | | | |
| | | Length = 368 | | | | | | | |
| 116 | 828679 | | | 142 | 318 | | | HPJAC93 | |
| 117 | 828680 | DNA primase (subunit p48) [Homo sapiens] | gi\|510406 | 74 | 652 | 100 | 100 | HPICG94 | |
| | | >pir\|S45630\|S45630 DNA primase chain p48- | | | | | | | |
| | | human >sp\|P49642\|PRI1_HUMAN DNA | | | | | | | |
| | | PRIMASE SMALL SUBUNIT (EC 2.7.7.-) | | | | | | | |
| | | (DNA PRiMASE 49 KD SUBUNIT) (P49). | | | | | | | |
| | | >gi\|2353692 DNA primase 1 [Homo sapiens] | | | | | | | |
| | | {SUB 97-146} Length = 420 | | | | | | | |
| 118 | 828681 | | | 3 | 167 | | | HPJAA30 | |
| 119 | 828682 | | | 3 | 617 | | | HPIBM51 | |
| 120 | 828683 | | | 54 | 329 | | | HPIBR22 | |
| 121 | 828686 | (AF006010) progestin induced protein [Homo | gi\|4101695 | 2 | 886 | 95 | 97 | HPIBQ56 | |
| | | sapiens]>sp\|G4101695\|G4101695 PROGESTIN | | | | | | | |
| | | INDUCED PROTEIN. Length = 2796 | | | | | | | |
| 122 | 828687 | | | 27 | 131 | | | HPIBS12 | |
| 123 | 828688 | CCAAT-box DNA binding protein subunit NF- | gi\|189199 | 128 | 757 | 100 | 100 | HPJAA20 | |
| | | YB [Homo sapiens] | | | | | | | |
| | | >sp\|P25208\|CBFA_HUMAN CCAAT- | | | | | | | |
| | | BINDING TRANSCRIPTION FACTOR | | | | | | | |
| | | SUBUNIT A (CBF-A) (NF-Y PROTEIN CHAIN | | | | | | | |
| | | B) (NF-YB) (CAAT-BOX DNA BINDING | | | | | | | |
| | | PROTEIN SUBUNIT B). | | | | | | | |
| 124 | 828689 | creatine kinase [Homo sapiens] | gi\|180590 | 227 | 1222 | 84 | 84 | HPICC13 | |
| | | >pir\|A31431\|A30789 creatine kinase (EC 2.7.3.2) | | | | | | | |
| | | precursor, mitochondrial-human | | | | | | | |
| | | >sp\|P12532\|KCRU_HUMAN CREATINE | | | | | | | |
| | | KINASE, UBIQUITOUS MITOCHONDRIAL | | | | | | | |
| | | PRECURSOR (EC 2.7.3.2) (U-MTCK) (MIA- | | | | | | | |
| | | CK) (ACIDIC-TYPE MITOCHONDRIAL | | | | | | | |
| | | CREATINE K | | | | | | | |
| 125 | 828692 | (AJ223301) aralkyl acyl-CoA:amino acid N- | gnl\|PID\|e1248977 | 278 | 1000 | 49 | 70 | HP1BO30 | |
| | | acyltransferase [Bos taurus]>gi\|2865607 | | | | | | | |
| | | (AF045032) aralkyl acyl-CoA:amino acid N- | | | | | | | |
| | | acyltransferase [Bos taurus]>sp\|O46686\|O46686 | | | | | | | |
| | | ARALKYL ACYL-COA:AMINO ACID N- | | | | | | | |
| | | ACYLTRANSFERASE (EC 2.3.1.13) | | | | | | | |
| | | (GLYCINE N-ACYLTRANSFERAS | | | | | | | |
| 126 | 828693 | dJ1409.2 (Melanoma-Associated Antigen | gnl\|PID\|e1311294 | 1 | 426 | 45 | 69 | HPIBL27 | |
| | | MAGE LIKE) [Homo sapiens] | | | | | | | |
| | | >sp\|O76058\|O76058 DJ1409.2 (MELANOMA- | | | | | | | |
| | | ASSOCIATED ANTIGEN MAGE LIKE). | | | | | | | |
| | | Length = 606 | | | | | | | |
| 127 | 828694 | | | 1 | 333 | | | HPIBY69 | |
| 128 | 828696 | | | 171 | 347 | | | HPIBA33 | |
| 129 | 828697 | kynurenine/alpha-aminoadipate aminotransferase | gi\|1050752 | 258 | 422 | 61 | 72 | HPICB03 | |
| | | [Rattus norvegicus]>sp\|Q64602\|Q64602 | | | | | | | |
| | | KYNURENINE/ALPHA-AMINOADIPATE | | | | | | | |
| | | AMINOTRANSFERASE (EC 2.6.1.7) | | | | | | | |
| | | (KYNURENINE-OXOGLUTARATE | | | | | | | |
| | | AMINOTRANSFERASE) (KYNURENINE | | | | | | | |
| | | AMINOTRANSFERASE). Length = 425 | | | | | | | |
| 130 | 828699 | | | 3 | 1109 | | | HPIBL48 | |
| 131 | 828702 | prostate-specific membrane antigen [Homo | gi\|190664 | 118 | 744 | 76 | 78 | HPIAZ02 | |
| | | sapiens]>pir\|A56881\|A56881 prostate-specific | | | | | | | |
| | | membrane antigen-human >bbs\|164191 | | | | | | | |
| | | prostate-specific membrane antigen, | | | | | | | |
| 132 | 828703 | | | 285 | 689 | | | HPTBB96 | |
| 133 | 828704 | put. DNA topoisomerase I (AA 1-864) | gi\|415338 | 2 | 406 | 98 | 98 | HPIBH30 | |
| | | [Escherichia coli]>gnl\|PID\|d1015527 DNA | | | | | | | |
| | | topoisomerase I (EC 5.99.1.2) (w-protein) | | | | | | | |
| | | (Relaxing enzyme) (Untwisting enzyme) | | | | | | | |
| | | (Swivelase). [Escherichia coli] | | | | | | | |
| 134 | 828706 | mitotic centromere-associated kinesin [Homo | gi\|1695882 | 559 | 1788 | 98 | 98 | HPIBJ11 | |
| | | sapiens]>sp\|Q99661\|Q99661 MITOTIC | | | | | | | |
| | | CENTROMERE-ASSOCIATED KINESIN. | | | | | | | |
| | | Length = 725 | | | | | | | |
| 135 | 828708 | | | 2 | 589 | | | HPIAW81 | |
| 136 | 828711 | | | 1 | 93 | | | HPIAZ32 | |
| 137 | 828712 | | | 49 | 309 | | | HPIAU16 | |
| 138 | 828713 | | | 142 | 396 | | | HPIAV37 | |
| 139 | 828714 | | | 68 | 1849 | | | HPIAV20 | |
| 140 | 828715 | | | 174 | 356 | | | HPIAS34 | |
| 141 | 828718 | ipa-6d gene product [Bacillus subtilis] | gi\|413930 | 403 | 1308 | 35 | 57 | HPIAL41 | |
| | | >gnl\|PID\|e1186348 alternate gene name: ipa-6d; | | | | | | | |
| | | similar to quinone biosynthesis [Bacillus subtilis] | | | | | | | |
| 142 | 828723 | UDP glucuronosyltransferase precursor [Homo | gi\|475759 | 3 | 206 | 97 | 100 | HIPIAL34 | |
| | | sapiens]>pir\|A48633\|A48633 | | | | | | | |
| | | dihydrotestosterone/androstanediol UDP- | | | | | | | |
| | | glucuronosyltransferase isoform 3, udpgth-3- | | | | | | | |
| | | human | | | | | | | |
| 143 | 828726 | hydrophobic membrane-bound protein | gi\|504499 | 1 | 255 | 98 | 98 | HPIAS69 | |
| | | [Escherichia coli]>gi\|1147818 part of a | | | | | | | |
| | | molybdenum periplasmic binding protein | | | | | | | |
| | | dependent transport system [Escherichia coli] | | | | | | | |
| | | >gi\|973215 ModB [Escherichia coli] | | | | | | | |
| 144 | 828728 | (AF044954) NADH:ubiquinone oxidoreductase | gi\|4164442 | 1 | 498 | 84 | 86 | HPJAS40 | |
| | | PDSW subunit [Homo sapiens]>gi\|4165091 | | | | | | | |
| | | (AF088991) NADH-ubiquinone oxidoreductase | | | | | | | |
| | | PDSW subunit [Homo sapiens] Length = 172 | | | | | | | |
| 145 | 828730 | MAK11 protein [Saccharomyces cerevisiae] | gi\|171877 | 394 | 1569 | 34 | 64 | HPHAF82 | |
| | | >gi\|486013 ORF YKL021c [Saccharomyces | | | | | | | |
| | | cerevisiae]>pir\|A29938\|A29938 MAK11 protein- | | | | | | | |
| | | yeast (Saccharomyces cerevisiae) | | | | | | | |
| | | >sp\|P20484\|MK11_YEAST MAK11 PROTEIN. | | | | | | | |
| | | Length = 468 | | | | | | | |
| 146 | 828732 | rab geranylgeranyl transferase [Homo sapiens] | gnl\|PID\|e1256376 | 155 | 868 | 97 | 97 | HPIAN07 | |
| | | >pir\|JC5538\|JC5538 Rab geranylgeranyl | | | | | | | |
| | | transferase (EC 2.5.1.-) alpha chain-human | | | | | | | |
| | | >sp\|E1256376\|E1256376 RAB | | | | | | | |
| | | GERANYLGERANYL TRANSFERASE. | | | | | | | |
| | | Length = 567 | | | | | | | |
| 147 | 828733 | | | 202 | 438 | | | HPIAK81 | |
| 148 | 828735 | (AF006265) cancer associated surface antigen | gi\|2213934 | 369 | 1139 | 90 | 90 | HPIAE30 | |
| | | [Homo sapiens]>gnl\|PID\|d1023440 (AB007619) | | | | | | | |
| | | EBAG9 [Homo sapiens]>sp\|O00559\|O00559 | | | | | | | |
| | | CANCER ASSOCIATED SURFACE | | | | | | | |
| | | ANTIGEN. Length = 213 | | | | | | | |
| 149 | 828736 | | | 1 | 132 | | | HPFEA11 | |
| 150 | 828739 | | | 60 | 347 | | | HPIAA46 | |
| 151 | 828740 | | | 2 | 394 | | | HPIAC69 | |
| 152 | 828742 | | | 2 | 475 | | | HPHAB61 | |
| 153 | 828748 | glandular kallikrein precursor [Homo sapiens]gi\|3868423 | 707 | 95 | 96 | | | HPEAB20 | |
| | | >pir\|A29586\|A29586 tissue kallikrein (EC | | | | | | | |
| | | 3.4.21.35) hGK-1 precursor-human | | | | | | | |
| | | >sp\|P20151\|KLK2_HUMAN GLANDULAR | | | | | | | |
| | | KALLIKREIN 2 PRECURSOR (EC 3.4.21.35) | | | | | | | |
| | | (TISSUE KALLIKREIN) (PROSTATE) (HGK- | | | | | | | |
| | | 1). Length = 261 | | | | | | | |
| 154 | 828749 | serine/threonine kinase [Rattus norvegicus] | gnl\|PID\|e290956 | 443 | 826 | 94 | 99 | HPIAA79 | |
| | | >sp\|O08678\|O08678 SERINE/THREONINE | | | | | | | |
| | | KTNASE. Length = 793 | | | | | | | |
| 155 | 828752 | androgen regulated homeobox protein [Homo | gi\|1732378 | 1051 | 1692 | 99 | 99 | HPIAA91 | |
| | | sapiens]>sp\|Q99801\|HK31_HUMAN | | | | | | | |
| | | HOMEOBOX PROTEIN NKX-3.1. Length = | | | | | | | |
| | | 234 | | | | | | | |
| 156 | 828753 | | | 2 | 187 | | | HPFEA08 | |
| 157 | 828754 | | | 423 | 566 | | | HPFDD83 | |
| 158 | 828757 | | | 2 | 409 | | | HPFDI21 | |
| 159 | 828761 | | | 3 | 113 | | | HPFDE61 | |
| 160 | 828762 | | | 3 | 317 | | | HPFDE33 | |
| 161 | 828764 | cytochrome c oxidase subunit VIc preprotein | gnl\|PID\|e223120 | 51 | 329 | 100 | 100 | HPMSH48 | |
| | | [Homo sapiens]>gi\|3859868 (AF067637) | | | | | | | |
| | | cytochrome c oxidase subunit VIc [Homo | | | | | | | |
| | | sapiens] | | | | | | | |
| 162 | 828765 | | | 3 | 80 | | | HPFDB49 | |
| 163 | 828766 | | | 90 | 242 | | | HPFDT61 | |
| 164 | 828767 | | | 797 | 937 | | | HPWDK71 | |
| 165 | 828768 | | | 1109 | 1324 | | | HPFDD04 | |
| 166 | 828770 | | | 156 | 392 | | | HPFDF79 | |
| 167 | 828771 | (AF001629) WASP interactor protein [Homo | gi\|4100621 | 1 | 273 | 55 | 61 | HPFDS50 | |
| | | sapiens]>sp\|G4100621\|G4100621 WASP | | | | | | | |
| | | INTERACTOR PROTEIN (FRAGMENT). | | | | | | | |
| | | Length = 328 | | | | | | | |
| 168 | 828772 | | | 200 | 340 | | | HPFDT28 | |
| 169 | 828773 | | | 115 | 348 | | | HPFDE85 | |
| 170 | 828775 | | | 23 | 208 | | | HPFCR19 | |
| 171 | 828776 | | | 3 | 134 | | | HPFCY40 | |
| 172 | 828777 | | | 131 | 919 | | | HPFDM39 | |
| 173 | 828778 | | | 2 | 121 | | | HPFCZ89 | |
| 174 | 828780 | | | 46 | 420 | | | HPFDA70 | |
| 175 | 828781 | | | 408 | 734 | | | HPFCP06 | |
| 176 | 828782 | | | 61 | 186 | | | HPFDI40 | |
| 177 | 828783 | relaxin [Homo sapiens]>gi\|490063 Hi-relaxin | gi\|490056 | 68 | 253 | 70 | 70 | HPFCH80 | |
| | | [Homo sapiens]>gi\|412167 relaxin [Homo | | | | | | | |
| | | sapiens]>gi\|512431 preprorelaxin [Homo | | | | | | | |
| | | sapiens]>gi\|35933 prepro-relaxin H1 [Homo | | | | | | | |
| | | sapiens] | | | | | | | |
| 178 | 828784 | | | 82 | 321 | | | HPFCT79 | |
| 179 | 828785 | | | 32 | 250 | | | HPFCX77 | |
| 180 | 828786 | | | 302 | 532 | | | HIPFCT31 | |
| 181 | 828788 | | | 341 | 538 | | | HPFCI59 | |
| 182 | 828790 | | | 195 | 317 | | | HPFCT53 | |
| 183 | 828791 | | | 6 | 140 | | | HPFCI14 | |
| 184 | 828792 | | | 121 | 801 | | | HPFCC91 | |
| 185 | 828794 | | | 1219 | 1440 | | | HPFCJ56 | |
| 186 | 828797 | | | 128 | 259 | | | HPFCC42 | |
| 187 | 828798 | | | 237 | 350 | | | HPFCI76 | |
| 188 | 828799 | | | 113 | 322 | | | HPFAA95 | |
| 189 | 828801 | | | 90 | 239 | | | HPEAG41 | |
| 190 | 828802 | | | 165 | 392 | | | HPFCL26 | |
| 191 | 828803 | (AB022017) AMP-activated protein kinase | gnl\|PID\|d1037533 | 96 | 458 | 83 | 83 | HPFBA83 | |
| | | alpha-i [Homo sapiens] | | | | | | | |
| | | >sp\|D1037533\|D1037533 AMP-ACTIVATED | | | | | | | |
| | | PROTEIN KINASE ALPHA-1. | | | | | | | |
| | | >gnl\|PID\|e315274 AMP-activated protein kinase | | | | | | | |
| | | alpha-1 [Homo sapiens] {SUB 294-550} | | | | | | | |
| 192 | 828804 | | | 98 | 286 | | | HPEAC32 | |
| 193 | 828805 | | | 166 | 303 | | | HPFCF17 | |
| 194 | 828807 | | | 1 | 195 | | | HPFCF96 | |
| 195 | 828809 | | | 147 | 236 | | | HPEAC52 | |
| 196 | 828810 | | | 1 | 153 | | | HPEBT31 | |
| 197 | 828811 | | | 283 | 426 | | | HPFAA06 | |
| 198 | 828817 | | | 2 | 160 | | | HPCAC47 | |
| 199 | 828818 | | | 1 | 258 | | | HPEAA76 | |
| 200 | 828819 | | | 345 | 623 | | | HPEBG44 | |
| 201 | 828820 | | | 314 | 502 | | | HPEAB80 | |
| 202 | 828821 | | | 246 | 416 | | | HPCAF64 | |
| 203 | 828823 | spore coat protein SP87 [Dictyostelium | gi\|915203 | 267 | 875 | 44 | 61 | HPEAB79 | |
| | | discoideum] Length = 677 | | | | | | | |
| 204 | 828824 | | | 458 | 643 | | | HPCAC56 | |
| 205 | 828825 | | | 132 | 446 | | | HPDDY72 | |
| 206 | 828826 | | | 2 | 730 | | | HPCAN60 | |
| 207 | 828829 | | | 499 | 672 | | | HPCAO54 | |
| 208 | 828830 | Arnt [Homo sapiens]>pir\|I59550\|I59550 Arnt- | gi\|179004 | 1 | 219 | 90 | 92 | HPCAA27 | |
| | | human >sp\|P27540\|ARNT_HUMAN ARYL | | | | | | | |
| | | HYDROCARBON RECEPTOR NUCLEAR | | | | | | | |
| | | TRANSLOCATOR (ARNT PROTEIN) | | | | | | | |
| | | (DIOXIN RECEPTOR, NUCLEAR | | | | | | | |
| | | TRANSLOCATOR) (HYPOXIA-INDUCIBLE | | | | | | | |
| | | FACTOR 1 BETA) (HIF-1 BETA). Length = | | | | | | | |
| | | 789 | | | | | | | |
| 209 | 828833 | | | 42 | 278 | | | HPCAB16 | |
| 210 | 828835 | | | 61 | 474 | | | HOUDC43 | |
| 211 | 828838 | chordin [Xenopus laevis]>pir\|A55195\|A55195 | gi\|603945 | 2 | 1468 | 43 | 56 | HPCAO32 | |
| | | chordin precursor-African clawed frog | | | | | | | |
| | | >sp\|Q91713\|CHRD_XENLA CHORDIN | | | | | | | |
| | | PRECURSOR (ORGANIZER-SPECIFIC | | | | | | | |
| | | SECRETED DORSALIZING FACTOR). Length = | | | | | | | |
| | | 941 | | | | | | | |
| 212 | 828840 | | | 536 | 679 | | | HOVCJ65 | |
| 213 | 828845 | | | 69 | 212 | | | HOSDG69 | |
| 214 | 828846 | | | 3 | 1034 | | | HSPBQ12 | |
| 215 | 828847 | | | 36 | 395 | | | HPEAA46 | |
| 216 | 828849 | (AF041474) BAF53a [Homo sapiens] | gi\|4001803 | 62 | 1468 | 100 | 100 | HOVCJ86 | |
| | | >sp\|G4001803\|G4001803 BAF53A. Length = | | | | | | | |
| | | 429 | | | | | | | |
| 217 | 828850 | putative [Homo sapiens]>pir\|A49364\|A49364 59 | gi\|306712 | 2 | 283 | 97 | 97 | HOUCP33 | |
| | | protein, brain-human (fragment) | | | | | | | |
| | | >sp\|Q09019\|DMR9_HUMAN DMR-N9 | | | | | | | |
| | | PROTEIN (PROTEIN 59) (FRAGMENT). | | | | | | | |
| | | Length = 553 | | | | | | | |
| 218 | 828852 | | | 96 | 437 | | | HOSAZ63 | |
| 219 | 828853 | (AC004449) R33683_3 [Homo sapiens] | gi\|2979531 | 1 | 465 | 40 | 62 | HOSAV36 | |
| | | >sp\|O60372\|O60372 R33683_3 (FRAGMENT). | | | | | | | |
| | | Length =103 | | | | | | | |
| 220 | 828857 | uridine kinase Mus musculus] Length = 260 | gi\|471981 | 3 | 1013 | 74 | 88 | HOQBM19 | |
| 221 | 828861 | | | 2 | 991 | | | HPEAE55 | |
| 222 | 828866 | enhancer of filmentation 1 [Homo sapiens] | gi\|1280212 | 143 | 637 | 100 | 100 | HOHBF14 | |
| | | >gi\|1490787 Crk-associated substrate related | | | | | | | |
| | | protein Cas-L [Homo sapiens] | | | | | | | |
| | | >sp\|Q14511\|Q14511 ENHANCER OF | | | | | | | |
| | | FILMENTATION 1. Length = 834 | | | | | | | |
| 223 | 828872 | pericentriol material 1 [Homo sapiens] | gi\|450277 | 295 | 879 | 93 | 94 | HOHAL47 | |
| | | >pir\|A54103\|A54103 centrosome autoantigen | | | | | | | |
| | | PCM-1-human >sp\|Q15154\|Q15154 | | | | | | | |
| | | PERICENTRIOL MATERIAL 1. Length = 2024 | | | | | | | |
| 224 | 828874 | histone H1(0) (aa 1-194) [Homo sapiens] | gi\|32107 | 3 | 902 | 82 | 82 | HOGBL72 | |
| | | >pir\|A24850\|HSHU10 histone H1-0-human | | | | | | | |
| | | >sp\|P07305\|H10_HUMAN HISTONE H1′ | | | | | | | |
| | | (H1.0) (H1(0)). {SUB 2-194} Length = 194 | | | | | | | |
| 225 | 828875 | myosin VI [Homo sapiens] | gi\|2304981 | 1 | 450 | 99 | 99 | HOGCC24 | |
| | | >sp\|G2304981\|G2304981 MYOSIN VI. Length = | | | | | | | |
| | | 1262 | | | | | | | |
| 226 | 828877 | 75 kDa subunit NADH dehydrogenase precursor | gi\|38079 | 24 | 275 | 95 | 97 | HOFMJ67 | |
| | | [Homo sapiens]>pir\|S17854\|S17854 NADH | | | | | | | |
| | | dehydrogenase (ubiquinone) (EC 1.6.5.3) 75 K | | | | | | | |
| | | chain precursor-human | | | | | | | |
| 227 | 828878 | S-adenosylmethionine decarboxylase proenzyme | gi\|178518 | 282 | 1325 | 95 | 95 | HOGCO89 | |
| | | (EC 4.1.1.50) old gene name ‘AMD’ [Homo | | | | | | | |
| | | sapiens]>pir\|A31786\|DCHUDM | | | | | | | |
| | | adenosylmethionine decarboxylase (EC 4.1.1.50) | | | | | | | |
| | | precursor-human | | | | | | | |
| 228 | 828879 | | | 2 | 271 | | | HOEJI17 | |
| 229 | 828881 | | | 139 | 969 | | | HOGAF39 | |
| 230 | 828885 | product possesses binding site dependent | gi\|30956 | 173 | 1639 | 94 | 95 | HOEEC58 | |
| | | transcriptional suppressing activity [Homo | | | | | | | |
| | | sapiens]>pir\|A44351\|A44351 transcription | | | | | | | |
| | | repressor E4BP4-human >sp\|Q1421\|Q14211 | | | | | | | |
| | | E4BP4 GENE. Length = 462 | | | | | | | |
| 231 | 828886 | | | 82 | 228 | | | HODGT65 | |
| 232 | 828887 | ZNF127-Xp [Homo sapiens] | gi\|1304599 | 2 | 1327 | 56 | 76 | HOECN41 | |
| | | >sp\|Q13434\|Q13434 ZNF127-XP. Length = 485 | | | | | | | |
| 233 | 828889 | neurofibromin [Homo sapiens] | gi\|292354 | 265 | 690 | 89 | 89 | HODAQ30 | |
| | | >sp\|P21359\|NF1_HUMAN NEUROFIBROMIN | | | | | | | |
| | | (NEUROFIBROMATOSIS-RELATED | | | | | | | |
| | | PROTEIN NFl). >gi\|736765 neurofibromatosis | | | | | | | |
| | | 1 [Homo sapiens] {SUB 751-1611}>gi\|189161 | | | | | | | |
| | | neurofibromatosis protein type 1 [Homo sapiens] | | | | | | | |
| | | {SUB 1168-1566} | | | | | | | |
| 234 | 828891 | FAST kinase [Homo sapiens]>pir\|I37386\|I37386 | gi\|1006659 | 84 | 1238 | 100 | 100 | HODDG78 | |
| | | FAST kinase-human >sp\|Q14296\|Q14296 | | | | | | | |
| | | FAST KINASE. Length = 549 | | | | | | | |
| 235 | 828899 | | | 3 | 344 | | | HNWAA42 | |
| 236 | 828907 | | | 3 | 566 | | | HNTSS75 | |
| 237 | 828911 | | | 1217 | 1501 | | | HNTMC68 | |
| 238 | 828914 | MAP KINASE-ACTIVATED PROTEIN | sp\|P49137\|MKK2_H | 586 | 1176 | 98 | 99 | HNTRL23 | |
| | | KINASE 2 (EC 2.7.1.-) (MAPK-ACTIIVATED | UMAN | | | | | | |
| | | PROTEIN KINASE 2) (MAPKAP KINASE 2) | | | | | | | |
| | | (MAPKAPK-2). Length = 400 | | | | | | | |
| 239 | 828917 | zinc finger protein 7 (ZFP7) [Homo sapiens] | gi\|340446 | 790 | 1536 | 57 | 70 | HNTCR38 | |
| | | >pir\|A34612\|A34612 zinc finger protein ZNF7- | | | | | | | |
| | | human Length = 686 | | | | | | | |
| 240 | 828921 | RNA helicase [Homo sapiens] | gnl\|PID\|e254454 | 123 | 1253 | 90 | 90 | HNTRO07 | |
| | | >pir\|S71758\|S71758 DEAD box protein MrDb, | | | | | | | |
| | | Myc-regulated-human >sp\|Q92732\|Q92732 | | | | | | | |
| | | RNA HELICASE. Length = 610 | | | | | | | |
| 241 | 828922 | | | 138 | 1403 | | | HNTAB76 | |
| 242 | 828924 | (AE000180) biotin synthesis, sulfur insertion? | gi\|1786992 | 1 | 78 | 95 | 95 | HNHAG14 | |
| | | [Escherichia coli]>gi\|490219 BIOB gene product | | | | | | | |
| | | [Escherichia coli]>gnl\|PID\|e305036 BIOTIN | | | | | | | |
| | | SYNTHASE [Escherichia coli] | | | | | | | |
| | | >pir\|JC2517\|SYECBB biotin synthetase (EC | | | | | | | |
| | | 2.8.1.-)-Escherichia coli | | | | | | | |
| | | >sp\|P12996\|BIOB_ECOL | | | | | | | |
| 243 | 828925 | | | 376 | 426 | | | HNGKM39 | |
| 244 | 828926 | | | 28 | 522 | | | HNTBH70 | |
| 245 | 828928 | | | 1 | 330 | | | HNGNK23 | |
| 246 | 828930 | casein kinase I-alpha [Homo sapiens] | gi\|852055 | 412 | 1467 | 89 | 91 | HNFJH94 | |
| | | >pir\|A57011\|A57011 casein kinase I-alpha- | | | | | | | |
| | | human Length = 337 | | | | | | | |
| 247 | 828935 | (AL021366) cICK0721Q.3 (Kinesin related | gnl\|PID\|e1330109 | 2 | 1447 | 86 | 86 | HNTRL26 | |
| | | protein) [Homo sapiens]>sp\|O60887\|O60887 | | | | | | | |
| | | CICK0721Q.3 (KINESIN RELATED | | | | | | | |
| | | PROTEIN). >gnl\|PID\|e1332987 (AJ010479) | | | | | | | |
| | | kinesin-like protein [Homo sapiens] {SUB 1- | | | | | | | |
| | | 274}Length = 673 | | | | | | | |
| 248 | 828937 | apurinic/apyrimidinic endonuclease [Homo | gi\|178747 | 124 | 1158 | 95 | 95 | HNTNM15 | |
| | | sapiens]>gi\|183780 apurinic/apyrimidinic | | | | | | | |
| | | endonuclease [Homo sapiens]>gi\|32022 AP | | | | | | | |
| | | endonuclease 1 [Homo sapiens]>bbs\|111437 | | | | | | | |
| | | Ref-1=redox factor [human, Peptide, 318 aa] | | | | | | | |
| | | [Homo sapiens]>pir\|S23550\|S23550 DNA- | | | | | | | |
| | | (apurin | | | | | | | |
| 249 | 828940 | pol polyprotein-Moloney murine leukemia virus | pir\|A46311\|A46311 | 1399 | 1806 | 58 | 71 | HNGGG72 | |
| | | (strain 3-1R) (fragment) Length = 559 | | | | | | | |
| 250 | 828942 | | | 3 | 386 | | | HNFHK65 | |
| 251 | 828943 | rapamycin binding protein [Homo sapiens] | gi\|182626 | 3 | 710 | 100 | 100 | HMWHS08 | |
| | | >gi\|182644 FK506-binding protein 25 [Homo | | | | | | | |
| | | sapiens]>pir\|JQ1522\|JQ1522 peptidylprolyl | | | | | | | |
| | | isomerase (EC 5.2.1.8) FKBP3-human | | | | | | | |
| | | >sp\|Q00688\|FKB3_HUMAN RAPAMYCIN- | | | | | | | |
| | | SELECTIVE 25 KD IMMUNOPHILIN | | | | | | | |
| | | (FKBP25) (PEPTIDYL-PROLYL CIS-T | | | | | | | |
| 252 | 828946 | hepatitis delta antigen interacting protein A | gi\|1488314 | 118 | 729 | 66 | 66 | HMWHE39 | |
| | | [Homo sapiens]>sp\|Q15834\|Q15834 | | | | | | | |
| | | HEPATITIS DELTA ANTIGEN | | | | | | | |
| | | INTERACTING PROTEIN A. Length = 202 | | | | | | | |
| 253 | 828947 | | | 199 | 396 | | | HMWIM20 | |
| 254 | 828956 | (AF029071) p52 pro-apototic protein [Gallus | gi\|2599492 | 470 | 1384 | 74 | 86 | HMWGG82 | |
| | | gallus] Length = 465 | | | | | | | |
| 255 | 828958 | | | 1 | 306 | | | HMWBS21 | |
| 256 | 828965 | pterin-4a-carbinolamine dehydratase [Homo | gi\|848985 | 2 | 370 | 100 | 100 | HMWED17 | |
| | | sapiens]>gi\|848987 pterin-4a-carbinolamine | | | | | | | |
| | | dehydratase [Homo sapiens]>gnl\|PID\|e1292435 | | | | | | | |
| | | (AJ005542) dimerization cofactor of HNF1; | | | | | | | |
| | | pterin-4a-carbinolamin dehydratase [Rattus | | | | | | | |
| | | norvegicus]>gnl\|PID\|e1292435 (AJ005542 | | | | | | | |
| 257 | 828969 | Ran-BP1 (Ran-binding protein 1) [Homo sapiens] | gnl\|PID\|d1007847 | 2 | 742 | 91 | 91 | HMWFM25 | |
| | | Length = 200 | | | | | | | |
| 258 | 828971 | | | 574 | 753 | | | HMVAJ71 | |
| 259 | 828973 | similar to leucyl-tRNA synthetase; | gnl\|PID\|e1344085 | 85 | 678 | 74 | 88 | HMUBQ39 | |
| 260 | 828980 | acidic 82 kDa protein [Homo sapiens] | gi\|558458 | 3 | 524 | 88 | 88 | HMTME58 | |
| | | >pir\|G01522\|G01522 acidic 82 kDa protein- | | | | | | | |
| | | human >sp\|Q12987\|Q12987 ACIDIC 82 KDA | | | | | | | |
| | | PROTEIN. Length = 736 | | | | | | | |
| 261 | 828984 | high mobility group box [Homo sapiens] | gi\|184242 | 322 | 2388 | 97 | 97 | HMUAQ01 | |
| | | >pir\|A41976\|A41976 structure-specific | | | | | | | |
| | | recognition protein, SSRP1-human Length = | | | | | | | |
| | | 709 | | | | | | | |
| 262 | 828985 | | | 734 | 928 | | | HMSGL25 | |
| 263 | 828988 | Similarity to Yeast MSP1 protein (TAT-binding | gnl\|PID\|e1347884 | 1 | 1137 | 79 | 88 | HMUBL18 | |
| | | homolog 4) (SW:MSP1_YEAST) | | | | | | | |
| | | [Caenorhabditis elegans] | | | | | | | |
| | | >sp\|P54815\|MSP1_CAEEL MSP1 PROTEIN | | | | | | | |
| | | HOMOLOG. Length = 357 | | | | | | | |
| 264 | 828993 | | | 78 | 308 | | | HMTMB67 | |
| 265 | 828995 | | | 653 | 1567 | | | HMSIV02 | |
| 266 | 829000 | | | 296 | 478 | | | HMMBW26 | |
| 267 | 829005 | | | 1 | 531 | | | HMQAI48 | |
| 268 | 829009 | GTP-binding protein [Homo sapiens] | gnl\|PID\|e1227622 | 64 | 927 | 88 | 88 | HMQAI69 | |
| | | >sp\|O43824\|O43824 GTP-BINDING PROTEiN. | | | | | | | |
| | | Length = 442 | | | | | | | |
| 269 | 829010 | (AF035537) DNA polymerase zeta [Homo | gi\|2665742 | 282 | 1262 | 93 | 93 | HMSGH89 | |
| | | sapiens] Length = 3052 | | | | | | | |
| 270 | 829012 | ribophorin II precursor-human Length = 631 | pir\|B26168\|B26168 | 161 | 2188 | 94 | 95 | HMSJH16 | |
| 271 | 829013 | | | 1339 | 1506 | | | HMIAX25 | |
| 272 | 829019 | | | 41 | 223 | | | HMIAJ48 | |
| 273 | 829020 | similar to WD domain, G-beta repeats (2 | gnl\|PID\|e1345001 | 21 | 800 | 60 | 77 | HMELR71 | |
| | | domains); | | | | | | | |
| 274 | 829021 | | | 356 | 640 | | | HMIAJ26 | |
| 275 | 829026 | RIZ [Homo sapiens]>sp\|Q13029\|Q13029 ZINC | gi\|3645905 | 89 | 1183 | 87 | 87 | HMELM45 | |
| | | FINGER PROTEIN RIZ. >pir\|I38902\|I38902 | | | | | | | |
| | | retinoblastoma-binding protein RIZ-human | | | | | | | |
| | | {SUB 3-1721 } Length = 1721 | | | | | | | |
| 276 | 829030 | chaperonin-like protein [Homo sapiens] | gi\|517065 | 1 | 1674 | 95 | 95 | HMICQ08 | |
| | | >pir\|S48087\|S48087 t-complex-type molecular | | | | | | | |
| | | chaperone CCT6-human >gi\|184462 | | | | | | | |
| | | chaperonin-like protein [Homo sapiens] {SUB | | | | | | | |
| | | 143-531} Length = 531 | | | | | | | |
| 277 | 829035 | (AF082516) I-1 receptor candidate protein | gi\|3462807 | 2 | 679 | 98 | 98 | HMEFK17 | |
| | | [Homo sapiens]>sp\|G3462807\|G3462807 I-1 | | | | | | | |
| | | RECEPTOR CANDIDATE PROTEIN. | | | | | | | |
| | | >gi\|3493225 (AF058290) imidazoline receptor | | | | | | | |
| | | antisera-selected protein [Homo sapiens] {SUB | | | | | | | |
| | | 469-1063} Length = 1504 | | | | | | | |
| 278 | 829041 | pyrroline-5-carboxylate reductase [Homo | gi\|189498 | 268 | 1032 | 99 | 100 | HMEIQ04 | |
| | | sapiens]>pir\|A41770\|A41770 pyrroline-5- | | | | | | | |
| | | carboxylate reductase (EC 1.5.1.2)-human | | | | | | | |
| | | >sp\|P32322\|PROC_HUMAN PYRROLINE-5- | | | | | | | |
| | | CARBOXYLATE REDUCTASE (EC 1.5.1.2) | | | | | | | |
| | | (P5CR) (P5C REDUCTASE). Length = 319 | | | | | | | |
| 279 | 829045 | | | 2 | 1771 | | | HMEKR35 | |
| 280 | 829048 | | | 115 | 1467 | | | HMEJC44 | |
| 281 | 829051 | | | 2 | 256 | | | HMEBI38 | |
| 282 | 829052 | | | 795 | 1154 | | | HMHBD67 | |
| 283 | 829057 | | | 116 | 799 | | | HMEAF61 | |
| 284 | 829058 | | | 3 | 536 | | | HMEER28 | |
| 285 | 829059 | | | 310 | 501 | | | HMDAQ69 | |
| 286 | 829061 | | | 3 | 101 | | | HMCFX82 | |
| 287 | 829062 | (AF095791) TACC2 protein [Homo sapiens] | gi\|3777596 | 1417 | 2622 | 50 | 71 | HMCGK90 | |
| | | >sp\|G3777596\|G3777596 TACC2 PROTEIN | | | | | | | |
| | | (FRAGMENT). Length = 653 | | | | | | | |
| 288 | 829063 | kinesin-like DNA binding protein KID-human | pir\|S62328\|S62328 | 58 | 1437 | 83 | 84 | HMEFH72 | |
| | | Length = 665 | | | | | | | |
| 289 | 829064 | | | 2 | 718 | | | HMADG63 | |
| 290 | 829066 | 37KD protein, similar to Y122-ECOLI | gnl\|PID\|d1013520 | 600 | 1427 | 98 | 98 | HMAHX38 | |
| | | [Escherichia coli]>sp\|Q47535\|Q47535 37KD | | | | | | | |
| | | PROTEIN, SIMILAR TO Y122-ECOLI. Length = | | | | | | | |
| | | 424 | | | | | | | |
| 291 | 829068 | (AF037204) RING zinc finger protein [Homo | gi\|2746333 | 432 | 1319 | 84 | 84 | HMSII92 | |
| | | sapiens]>gi\|3387925 (AF070558) RING zinc | | | | | | | |
| | | finger protein RZF [Homo sapiens] | | | | | | | |
| | | >sp\|O43567\|O43567 RING ZINC FINGER | | | | | | | |
| | | PROTEIN. Length = 381 | | | | | | | |
| 292 | 829069 | | | 1 | 207 | | | HLYET39 | |
| 293 | 829074 | | | 1 | 1269 | | | HLYDE91 | |
| 294 | 829077 | | | 181 | 873 | | | HLYFD84 | |
| 295 | 829078 | topoisomerase I [Homo sapiens]>gi\|473581 | gi\|339804 | 2 | 907 | 69 | 78 | HLYCP31 | |
| | | DNA topoisomerase I [Homo sapiens] {SUB 5- | | | | | | | |
| | | 765} >gnl\|PID\|e1312191 (AL022394) | | | | | | | |
| | | dJ511B24.1 (Topoisomerase I) [Homo sapiens] | | | | | | | |
| | | {SUB 437-765 } Length = 765 | | | | | | | |
| 296 | 829079 | | | 194 | 382 | | | HLYBT93 | |
| 297 | 829085 | putative ATP/GTP-binding protein [Homo | gi\|1644402 | 67 | 783 | 93 | 93 | HMCEJ41 | |
| | | sapiens]>sp\|Q92989\|Q92989 PUTATIVE | | | | | | | |
| | | ATP/GTP-BINDING PROTEIN. Length = 425 | | | | | | | |
| 298 | 829093 | 26S proteasome-associated pad 1 homolog [Homo | gi\|1923256 | 307 | 1251 | 100 | 100 | HLYAN96 | |
| | | sapiens]>sp\|O00487\|O00487 26S | | | | | | | |
| | | PROTEASOME-ASSOCIATED PAD 1 | | | | | | | |
| | | HOMOLOG. Length = 310 | | | | | | | |
| 299 | 829099 | alpha-L-fucosidase precursor (EC 3.2.1.5) [Homo | gi\|178409 | 2 | 850 | 96 | 96 | HLTDK55 | |
| | | sapiens]>pir\|A33427\|HWHUFA alpha-L- | | | | | | | |
| | | fucosidase (EC 3.2.1.51) 1 precursor, tissue- | | | | | | | |
| | | human >gnl\|PID\|e34843 alpha-L-fucosidase | | | | | | | |
| | | [Homo sapiens] {SUB 357-393} Length = 461 | | | | | | | |
| 300 | 829101 | protein tyrosine phosphatase [Homo sapiens] | gi\|804750 | 3 | 542 | 100 | 100 | HLYAP23 | |
| | | Length = 415 | | | | | | | |
| 301 | 829102 | !!!! ALU SUBFAMILY SQ WARNING ENTRY | sp\|P39194\|ALU7_HU | 3 | 59 | 84 | 94 | HLTEO83 | |
| | | !!!! Length = 593 | MAN | | | | | | |
| 302 | 829103 | | | 265 | 663 | | | HLWAC24 | |
| 303 | 829104 | | | 316 | 525 | | | HLWAX30 | |
| 304 | 829109 | | | 3 | 155 | | | HLTCF21 | |
| 305 | 829111 | | | 1 | 333 | | | HLTGS92 | |
| 306 | 829115 | | | 2 | 670 | | | HLTHA72 | |
| 307 | 829116 | | | 104 | 265 | | | HLQDA07 | |
| 308 | 829119 | | | 144 | 374 | | | HLMCG37 | |
| 309 | 829120 | | | 611 | 910 | | | HLTGP61 | |
| 310 | 829121 | | | 558 | 698 | | | HLQCN32 | |
| 311 | 829123 | aldehyde oxidase [Homo sapiens] | gi\|438656 | 7 | 585 | 99 | 99 | HLQDA57 | |
| | | >pir\|A49634\|A49634 aldehyde oxidase (EC | | | | | | | |
| | | 1.2.3.1)-human >sp\|Q06278\|ADO_HUMAN | | | | | | | |
| | | ALDEHYDE OXIDASE (EC 1.2.3.1). Length = | | | | | | | |
| | | 1338 | | | | | | | |
| 312 | 829126 | | | 2 | 154 | | | HLQCX53 | |
| 313 | 829135 | beta-D-galactosidase precursor (EC 3.2.1.23) | gi\|179401 | 3 | 2090 | 98 | 98 | HLQAM57 | |
| | | [Homo sapiens]>gi\|179423 beta-galactosidase | | | | | | | |
| | | precursor (EC 3.2.1.23) [Homo sapiens] | | | | | | | |
| | | >pir\|A32688\|A32611 beta-galactosidase (EC | | | | | | | |
| | | 3.2.1.23) precursor-human | | | | | | | |
| 314 | 829136 | (AJ005458) protein Phosphatase 2C beta [Bos | gnl\|PID\|e1287413 | 55 | 1254 | 95 | 96 | HLTHS28 | |
| | | taurusil]>sp\|O62830\|O62830 PROTEIN | | | | | | | |
| | | PHOSPHATASE 2C BETA (EC 3.1.3.16). | | | | | | | |
| | | Length = 387 | | | | | | | |
| 315 | 829138 | cytochrome b5 [Homo sapiens] | gi\|181227 | 35 | 499 | 89 | 89 | HLHTN31 | |
| | | >pir\|A28936\|CBHU5 cytochrome b5, | | | | | | | |
| | | microsomal form-human | | | | | | | |
| | | >sp\|P00167\|CYB5_HUMAN CYTOCHROME | | | | | | | |
| | | B5. {SUB 2-1341} >gi\|181229 cytochrome b5 | | | | | | | |
| | | [Homo sapiens]{SUB 87-1341} Length = 134 | | | | | | | |
| 316 | 829142 | (AF016509) oxidoreductase [Homo sapiens] | gi\|2338748 | 2 | 1135 | 99 | 99 | HLIBJ28 | |
| | | >sp\|O14756\|O14756 OXIDOREDUCTASE. | | | | | | | |
| | | Length = 317 | | | | | | | |
| 317 | 829148 | | | 55 | 279 | | | HLHDP51 | |
| 318 | 829149 | protein kinase C iota [Homo sapiens]>gi\|598225 | gi\|432274 | 1 | 783 | 99 | 100 | HLICD11 | |
| | | protein kinase C iota [Homo sapiens] | | | | | | | |
| | | >pir\|A49509\|A49509 protein kinase C (EC | | | | | | | |
| | | 2.7.1.-) iota-human | | | | | | | |
| 319 | 829156 | ORF YDL063c [Saccharomyces cerevisiae] | gnl\|PID\|e253210 | 3 | 347 | 82 | 83 | HLHCD19 | |
| | | >pir\|S67598\|S67598 probable membrane protein | | | | | | | |
| | | YDL063c-yeast (Saccharomyces cerevisiae) | | | | | | | |
| 320 | 829162 | (AF019767) zinc finger protein [Homo sapiens] | gi\|3510462 | 3 | 890 | 88 | 89 | HLGDA89 | |
| | | >sp\|O75312\|O75312 ZINC FINGER PROTEIN. | | | | | | | |
| | | Length = 459 | | | | | | | |
| 321 | 829170 | | | 2 | 160 | | | HLDBY56 | |
| 322 | 829177 | complement factor B [Homo sapiens] | gi\|291922 | 1 | 600 | 86 | 87 | HLDBN31 | |
| | | >gi\|2347133 (AF019413) complement factor B | | | | | | | |
| | | [Homo sapiens]>gi\|553536 MHC factor B | | | | | | | |
| | | [Homo sapiens] {SUB 339-509} Length = 764 | | | | | | | |
| 323 | 829179 | | | 518 | 847 | | | HL2AG36 | |
| 324 | 829184 | CDC2 polypeptide (CDC2) (AA 1-297) [Homo | gi\|29839 | 553 | 1005 | 98 | 98 | HL1BD94 | |
| | | sapiens]>gi\|29841 CDC2 protein (AA 1-297) | | | | | | | |
| | | [Homo sapiens]>pir\|A29539\|A29539 protein | | | | | | | |
| | | kinase (EC 2.7.1.37) cdc2-human | | | | | | | |
| | | >sp\|P06493\|CC2_HUMAN CELL DIVISION | | | | | | | |
| | | CONTROL PROTEIN 2 HOMOLOG (EC | | | | | | | |
| | | 2.7.1.-) (P34 PROTEIN KINASE) | | | | | | | |
| 325 | 829185 | | | 77 | 295 | | | HL2AH06 | |
| 326 | 829188 | M-phase phosphoprotein 4 [Homo sapiens] | gnl\|PID\|e248491 | 282 | 1238 | 92 | 92 | HLAAB63 | |
| | | >sp\|Q99545\|Q99545 M-PHASE | | | | | | | |
| | | PHOSPHOPROTEIN 4 (FRAGMENT). Length = | | | | | | | |
| | | 611 | | | | | | | |
| 327 | 829190 | (AF038869) eukaryotic initiation factor 4E- | gi\|3169393 | 3 | 359 | 87 | 87 | HL2AG38 | |
| | | binding protein 3 [Homo sapiens] | | | | | | | |
| | | >sp\|O60516\|O60516 EUKARYOTIC | | | | | | | |
| | | INITIATION FACTOR 4E-BINDING | | | | | | | |
| | | PROTEIN 3. Length = 100 | | | | | | | |
| 328 | 829193 | protein kinase [Homo sapiens] | gi\|312998 | 2 | 988 | 94 | 94 | HL4AF38 | |
| | | >pir\|S34130\|S34130 serine/threonine-specific | | | | | | | |
| | | protein kinase PLK (EC 2.7.1.-)-human | | | | | | | |
| | | >sp\|P53350\|PLK1_HUMAN | | | | | | | |
| | | SERINE/THREONINE-PROTEIN KINASE | | | | | | | |
| | | PLK (EC 2.7.1.-) (PLK-1) (SERINE- | | | | | | | |
| | | THREONINE PROTEIN KINASE 13) | | | | | | | |
| | | (STPK 13). Length = 603 | | | | | | | |
| 329 | 829196 | | | 1 | 432 | | | HL1AR10 | |
| 330 | 829197 | TAK1 binding protein [Homo sapiens] | gi\|1401126 | 1 | 252 | 75 | 76 | HL1BM07 | |
| | | >sp\|Q15750\|Q15750 TAK1 BINDING | | | | | | | |
| | | PROTEIN. Length = 504 | | | | | | | |
| 331 | 829202 | (AF060502) peroxisome assembly protein | gi\|3170653 | 97 | 465 | 92 | 94 | HL1AY04 | |
| | | PEX1O [Homo sapiens] | | | | | | | |
| | | >sp\|O60683\|PEXA_HUMAN PEROXISOME | | | | | | | |
| | | ASSEMBLY PROTEIN PEX10 (PEROXIN-10). | | | | | | | |
| | | Length = 326 | | | | | | | |
| 332 | 829203 | | | 1 | 258 | | | HL1AL88 | |
| 333 | 829209 | | | 127 | 342 | | | HL2AF80 | |
| 334 | 829210 | | | 148 | 315 | | | HL1AG80 | |
| 335 | 829214 | cyclin G2 [Homo sapiens]>gi\|1236915 cyclin | gi\|1236235 | 2 | 484 | 74 | 74 | HKMSB51 | |
| | | G2 [Homo sapiens]>sp\|Q16589\|Q16589 | | | | | | | |
| | | CYCLIN G2. Length = 344 | | | | | | | |
| 336 | 829215 | | | 29 | 175 | | | HL1AG81 | |
| 337 | 829219 | | | 24 | 290 | | | HL1AG22 | |
| 338 | 829220 | | | 68 | 664 | | | HKMMC06 | |
| 339 | 829222 | (AF016371) U-snRNP-associated cyclophilin | gi\|2708309 | 1 | 549 | 100 | 100 | HKGBU67 | |
| | | [Homo sapiens]>gi\|364723O (AF036331) | | | | | | | |
| | | cyclophilin [Homo sapiens]>sp\|O43447\|O43447 | | | | | | | |
| | | U-SNRNP-ASSOCIATED CYCLOPHILIN (EC | | | | | | | |
| | | 5.2.1.8). Length = 177 | | | | | | | |
| 340 | 829223 | | | 2 | 187 | | | HL1AC64 | |
| 341 | 829225 | probable transposase-human transposable | pir\|S72481\|S72481 | 1607 | 1720 | 80 | 87 | HNEBF88 | |
| | | element MER37 >pir\|S72486\|S72486 putative | | | | | | | |
| | | transposase-human transposon MER37 | | | | | | | |
| | | (fragment) {SUB 177-349 } Length 454 | | | | | | | |
| 342 | 829226 | pre-B cell enhancing factor [Homo sapiens] | gi\|404013 | 186 | 1730 | 97 | 97 | HKMMZ30 | |
| | | >pir\|A55927\|A55927 pre-B cell enhancing factor- | | | | | | | |
| | | human >sp\|P43490\|PBEF_HUMAN PRE-B | | | | | | | |
| | | CELL ENHANCING FACTOR PRECURSOR. | | | | | | | |
| | | Length = 491 | | | | | | | |
| 343 | 829227 | | | 285 | 548 | | | HKIYE27 | |
| 344 | 829231 | | | 42 | 92 | | | HKMME67 | |
| 345 | 829232 | cyclin A [Homo sapiens]>gi\|510604 cyclin A | gi\|30307 | 2 | 1546 | 94 | 95 | HKGDC59 | |
| | | [Homo sapiens]>pir\|S08277\|S08277 cyclin A- | | | | | | | |
| | | human >sp\|P20248\|CG2A_HUMAN | | | | | | | |
| | | G2/MITOTIC-SPECWIC CYCLIN A. Length = | | | | | | | |
| | | 432 | | | | | | | |
| 346 | 829233 | | | 123 | 446 | | | HKGBH49 | |
| 347 | 829239 | | | 141 | 782 | | | HKFBA66 | |
| 348 | 829240 | | | 144 | 347 | | | HKGAB62 | |
| 349 | 829242 | palmitoyl-protein thioesterase [Homo sapiens] | gi\|1160967 | 2 | 955 | 100 | 100 | HKHAK14 | |
| | | >gi\|1314355 palmitoyl protein thioesterase | | | | | | | |
| | | [Homo sapiens]>gi\|2465725 (AF022211) | | | | | | | |
| | | palmitoyl-protein thioesterase [Homo sapiens] | | | | | | | |
| | | >sp\|P50897\|PPT_HUMAN PALMITOYL- | | | | | | | |
| | | PROTEIN THIOBSTERASE PRECURSOR (EC | | | | | | | |
| | | 3.1.2.22) (PALMI | | | | | | | |
| 350 | 829246 | | | 68 | 424 | | | HKAFK34 | |
| 351 | 829250 | | | 169 | 309 | | | HKAJW63 | |
| 352 | 829253 | | | 158 | 982 | | | HKAHA61 | |
| 353 | 829256 | (AF094583) putative HIV-1 infection related | gi\|3885931 | 1043 | 1831 | 89 | 89 | HKAFL67 | |
| | | protein [Homo sapiens] | | | | | | | |
| | | >sp\|G3885931\|G3885931 PUTATIVE HIV-1 | | | | | | | |
| | | INFECTION RELATED PROTEIN | | | | | | | |
| | | (FRAGMENT). Length = 129 | | | | | | | |
| 354 | 829263 | histone H4 [Tigriopus californicus]>gi\|297562 | gi\|10616 | 2 | 361 | 98 | 98 | HKADJ19 | |
| | | histone H4 [Chironomus thummi]>gi\|7084 | | | | | | | |
| | | histone H4 gene product [Chironomus thummi] | | | | | | | |
| | | >gi\|7440 histone H4 [Drosophila hydei] | | | | | | | |
| | | >gnl\|PID\|e242831 histone H4 [Drosophila hydei] | | | | | | | |
| | | >gnl\|PID\|e242923 histone H4 [Drosophil | | | | | | | |
| 355 | 829266 | similar to S. cerevisiae longevity-assurance | gi\|1123105 | 115 | 636 | 43 | 58 | HKADL80 | |
| | | protein 1 (SP:P38703) [Caenorhabditis elegans] | | | | | | | |
| | | >sp\|Q17870\|Q17870 SIMILAR TO S. | | | | | | | |
| | | CEREVISIAE LONGEVITY-ASSURANCE | | | | | | | |
| | | PROTEIN 1. Length = 362 | | | | | | | |
| 356 | 829271 | cAMP response element regulatory protein | gi\|181041 | 261 | 1118 | 86 | 86 | HL1AG18 | |
| | | [Homo sapiens]>gnl\|PID\|d1014939 TAXREB67 | | | | | | | |
| | | protein [Homo sapiens]>pir\|A45377\|A45377 | | | | | | | |
| | | transcription factor CREB-2 -human | | | | | | | |
| | | >sp\|P18848\|ATF4_HUMAN CYCLIC-AMP- | | | | | | | |
| | | DEPENDENT TRANSCRIPTION FACTOR | | | | | | | |
| | | ATF-4 (DNA-BINDING PROTEIN TAX | | | | | | | |
| 357 | 829273 | unknown [Homo sapiens]>pir\|I38891\|I38891 | gi\|1000712 | 1 | 507 | 94 | 94 | HKAEP12 | |
| | | hypothetical protein-human (fragment) | | | | | | | |
| | | >sp\|Q13021\|BENE_HUMAN BENE PROTEIN | | | | | | | |
| | | (FRAGMENT). Length = 148 | | | | | | | |
| 358 | 829274 | (AB006202) cytochrome b small subunit of | gnl\|PID\|d1022913 | 55 | 546 | 76 | 76 | HKAPF38 | |
| | | complex II [Homo sapiens] | | | | | | | |
| | | >sp\|O14521\|DHSD_HUMAN SUCCINATE | | | | | | | |
| | | DEHYDROGENASE [UBIQUINONE] | | | | | | | |
| | | CYTOCHROME B SMALL SUBUNIT | | | | | | | |
| | | PRECURSOR (CYBS) (SUCCINATE- | | | | | | | |
| | | UBIQUINONE REDUCTASE MEMBRANE | | | | | | | |
| | | ANCHOR SUBUNIT). Length = 159 | | | | | | | |
| 359 | 829276 | Similar to D.melanogaster cadherin-related tumor | gnl\|PID\|d1014097 | 272 | 2422 | 90 | 90 | HKACB58 | |
| | | suppressor [Homo sapiens]>sp\|Q92566\|Q92566 | | | | | | | |
| | | MYELOBLAST KIAA0279 (FRAGMENT). | | | | | | | |
| | | Length = 2408 | | | | | | | |
| 360 | 829279 | (AC005620) R33590_2, partial CDS [Homo | gi\|3548790 | 163 | 597 | 95 | 95 | HKAAS81 | |
| | | sapiens]>sp\|O75291\|O75291 R33590_2, | | | | | | | |
| | | PARTIAL CDS (FRAGMENT). Length = 121 | | | | | | | |
| 361 | 829280 | | | 172 | 375 | | | HJKSB47 | |
| 362 | 829283 | | | 235 | 414 | | | HJAAF37 | |
| 363 | 829284 | | | 2 | 322 | | | HJMBB19 | |
| 364 | 829285 | | | 706 | 912 | | | HKADQ69 | |
| 365 | 829287 | | | 134 | 358 | | | HJAAB29 | |
| 366 | 829295 | | | 81 | 212 | | | HJACK32 | |
| 367 | 829296 | | | 352 | 666 | | | HISAN67 | |
| 368 | 829297 | mitotic kinase-like protein-1 [Homo sapiens] | gi\|34672 | 1 | 225 | 98 | 98 | HJPBA19 | |
| | | >pir\|S28262\|S28262 kinesin-related protein | | | | | | | |
| | | MKLP-1 -human >sp\|Q02241\|MKLP_HUMAN | | | | | | | |
| | | MITOTIC KINESIN-LIKE PROTEIN-1. Length = | | | | | | | |
| | | 960 | | | | | | | |
| 369 | 829298 | O-6-methylguanine-DNA methyltransferase | gi\|187579 | 2 | 694 | 88 | 88 | HISAV27 | |
| | | [Homo sapiens]>gi\|307199 6-O-methylguanine- | | | | | | | |
| | | DNA methyltransferase (EC 2.1.1.63) [Homo | | | | | | | |
| | | sapiens]>gi\|34559 O-6-methylguanine-DNA | | | | | | | |
| | | methyltransferase [Homo sapiens] | | | | | | | |
| | | >pir\|A34889\|XUHUMC methylated-DNA- | | | | | | | |
| | | protein-cysteine S-m | | | | | | | |
| 370 | 829302 | | | 600 | 929 | | | HIBEJ72 | |
| 371 | 829304 | | | 300 | 716 | | | HKAAL43 | |
| 372 | 829320 | putative [Homo sapiens]>pir\|B41648\|B41648 | gi\|180173 | 161 | 853 | 100 | 100 | HIBCJ85 | |
| | | protein-tyrosine-phosphatase (EC 3.1.3.48) | | | | | | | |
| | | cdc25B-human >sp\|P30305\|MPI2_HUMAN M- | | | | | | | |
| | | PHASE INDUCER PHOSPHATASE 2 (EC | | | | | | | |
| | | 3.1.3.48). >gi\|2739200 (AF036233) cdc25B | | | | | | | |
| | | phosphatase [Homo sapiens] {SUB 56-3381} | | | | | | | |
| | | Length = 566 | | | | | | | |
| 373 | 829322 | capping protein alpha subunit isoform 1 [Homo | gi\|1336099 | 3 | 938 | 95 | 95 | HJBCY27 | |
| | | sapiens]>pir\|G02639\|G02639 capping protein | | | | | | | |
| | | alpha subunit isoform 1-human | | | | | | | |
| | | >sp\|P52907\|CAZ1_HUMAN F-ACTIN | | | | | | | |
| | | CAPPING PROTEIN ALPHA-1 SUBUNIT | | | | | | | |
| | | (CAPZ). Length = 286 | | | | | | | |
| 374 | 829355 | | | 3 | 782 | | | HHEAA46 | |
| 375 | 829364 | initiation factor 2 alpha [Bos taurus]>gi\|204002 | gi\|325 | 70 | 651 | 88 | 88 | HKAEV74 | |
| | | translational initiation factor eIF-2, alpha subunit | | | | | | | |
| | | [Rattus norvegicus]>pir\|A26711\|A26711 | | | | | | | |
| | | translation initiation factor eIF-2 alpha chain-rat | | | | | | | |
| | | >pir\|S18461\|S18461 translation initiation factor | | | | | | | |
| | | eIF-2 alph | | | | | | | |
| 376 | 829919 | | | 272 | 448 | | | HAJAC05 | |
| 377 | 829941 | weak similarity to procollagen alpha chain 1(V) | gi\|1065515 | 215 | 796 | 50 | 74 | HAIBC14 | |
| | | chain [Caenorhabditis elegans] | | | | | | | |
| | | >sp\|Q20220\|Q20220 SIMILARITY TO | | | | | | | |
| | | PROCOLLAGEN ALPHA CHAIN 1(V) | | | | | | | |
| | | CHAIN. Length = 697 | | | | | | | |
| 378 | 829945 | | | 43 | 222 | | | HAGHF36 | |
| 379 | 829946 | | | 2 | 319 | | | HAHCZ18 | |
| 380 | 829947 | (AF033188) WSB-2 [Mus musculus] | gi\|2766493 | 1 | 1206 | 95 | 98 | HAICN24 | |
| | | >sp\|O54929\|O54929 WSB-2. Length = 404 | | | | | | | |
| 381 | 829952 | | | 478 | 741 | | | HAICL28 | |
| 382 | 829954 | HIV-EP2/Schnurri-2 [Homo sapiens]>gi\|187405 | gi\|182120 | 2 | 853 | 80 | 82 | HAGDR03 | |
| | | MHC binding protein-2 [Homo sapiens] {SUB | | | | | | | |
| | | 1184-1323} Length = 1833 | | | | | | | |
| 383 | 829955 | zinc finger protein [Homo sapiens] | gi\|1575615 | 52 | 885 | 99 | 100 | HAGEX65 | |
| | | >sp\|Q92951\|Q92951 ZINC FINGER PROTEIN. | | | | | | | |
| | | Length = 273 | | | | | | | |
| 384 | 829957 | | | 1 | 744 | | | HAGEP17 | |
| 385 | 829958 | ribosomal protein L22 [Rattus norvegicus] | gi\|710295 | 2 | 418 | 62 | 74 | HAECH75 | |
| | | >pir\|S52084\|S52084 ribosomal protein L22-rat | | | | | | | |
| | | Length = 128 | | | | | | | |
| 386 | 829960 | sorbitol dehydrogenase [Homo sapiens] | gi\|520450 | 2 | 1069 | 97 | 97 | HAIBJ62 | |
| | | >gi\|1755138 sorbitol dehydrogenase [Homo | | | | | | | |
| | | sapiens]>pir\|A54674\|A54674 L-iditol 2- | | | | | | | |
| | | dehydrogenase (EC 1.1.1.14)-human | | | | | | | |
| | | >sp\|G1755138\|G1755138 SORBITOL | | | | | | | |
| | | DEHYDROGENASE. Length = 357 | | | | | | | |
| 387 | 829966 | (AF106835) putative DnaJ [Methylovorus sp. | gi\|4008O81 | 185 | 505 | 40 | 74 | HAGAX57 | |
| | | strain SS1]>sp\|G4008081\|G4008081 | | | | | | | |
| | | PUTATIVE DNAJ. Length = 371 | | | | | | | |
| 388 | 829967 | histone H1 [Homo sapiens] | gi\|31968 | 213 | 542 | 81 | 81 | HADDI38 | |
| | | >pir\|S26364\|HSHU11 histone Hi-1-human | | | | | | | |
| | | >sp\|P16403\|H1D_HUMAN HISTONE H1D | | | | | | | |
| | | (H1.2). {SUB 2-2131} Length = 213 | | | | | | | |
| 389 | 829970 | | | 3 | 878 | | | HADBH65 | |
| 390 | 829981 | transcription factor ATF-3-human (fragment) | pir\|C34223\|C34223 | 2 | 391 | 70 | 72 | HADFU64 | |
| | | Length = 222 | | | | | | | |
| 391 | 829985 | nuclear RNA helicase [Homo sapiens] | gi\|1905998 | 26 | 721 | 88 | 88 | HACBO64 | |
| | | >sp\|O00148\|O00148 NUCLEAR RNA | | | | | | | |
| | | HELICASE. Length = 427 | | | | | | | |
| 392 | 829986 | smooth muscle myosin heavy chain isoform SM1 | bbs\|140615 | 21 | 209 | 100 | 100 | HACBQ88 | |
| | | [human, umbilical cord, fetal aorta, Peptide | | | | | | | |
| | | Partial, 330 aa] [Homo sapiens] | | | | | | | |
| | | >pir\|I65768\|I65768 smooth muscle myosin heavy | | | | | | | |
| | | chain isoform SM1-human (fragment) | | | | | | | |
| | | >sp\|Q16086\|Q16086 SMOOTH MUSCLE | | | | | | | |
| | | MYOSIN HEAVY CHAIN | | | | | | | |
| 393 | 829988 | | | 325 | 849 | | | HACAI04 | |
| 394 | 829990 | | | 266 | 454 | | | HADFJ12 | |
| 395 | 829991 | NGFI-B/nur77 beta-type transcription factor | bbs\|164521 | 2 | 286 | 98 | 98 | HACBV53 | |
| | | homolog=TINUR [human, T lymphoid cell line, | | | | | | | |
| | | PEER, Peptide, 535 aa] [Homo sapiens] | | | | | | | |
| | | >sp\|Q16311\|Q16311 TINUR=NGFI-B/NUR77 | | | | | | | |
| | | BETA-TYPE TRANSCRIPTION FACTOR | | | | | | | |
| | | HOMOLOG. Length = 535 | | | | | | | |
| 396 | 829992 | | | 289 | 540 | | | HACBX74 | |
| 397 | 829993 | Not56-like protein [Homo sapiens] | gnl\|PID\|e276888 | 3 | 440 | 77 | 77 | H6EDW38 | |
| | | >sp\|Q92685\|NT56_HUMAN N0T 56-LIKE | | | | | | | |
| | | PROTEIN. Length = 438 | | | | | | | |
| 398 | 829998 | (AL033385) dna-directed ma polymerase iii | gnl\|PID\|e1339667 | 270 | 830 | 43 | 65 | H6EDK29 | |
| | | subunit [Schizosaccharomyces pombe] | | | | | | | |
| 399 | 829999 | | | 14 | 142 | | | H6BSE17 | |
| 400 | 830000 | NNP-1 [Homo sapiens] | gi\|2258274 | 545 | 856 | 77 | 77 | H6EEQ39 | |
| | | >sp\|P56182\|NNP1_HUMAN NNP-1 PROTEIN | | | | | | | |
| | | (D21S2056E). Length = 461 | | | | | | | |
| 401 | 830001 | homologous to rat HREV107 (ACC. NO. | gi\|1054752 | 397 | 903 | 88 | 88 | H2MBY64 | |
| | | X76453) [Homo sapiens] Length = 162 | | | | | | | |
| 402 | 830005 | alpha 1(XVIII) collagen [Mus musculus] | gi\|11298 | 3 | 347 | 37 | 42 | H6EEX40 | |
| | | >sp\|Q61437\|Q61437 PROCOLLAGEN, TYPE | | | | | | | |
| | | XVIII, ALPHA 1 (ALPHA 1 COLLAGEN) | | | | | | | |
| | | (XVIII) (FRAGMENT). Length = 1288 | | | | | | | |
| 403 | 830009 | TFIIE-beta [Homo sapiens]>bbs\|67862 general | gi\|37070 | 3 | 1028 | 93 | 93 | H2LAD85 | |
| | | transcription factor IIE 34 kda subunit, TFIIE 34 | | | | | | | |
| | | kda subunit [human, Peptide, 291 aa] [Homo | | | | | | | |
| | | sapiens]>pir\|S29292\|S29292 transcription factor | | | | | | | |
| | | TFIIE-beta-human Length = 291 | | | | | | | |
| 404 | 830010 | (AF062346) zinc finger protein 216 splice variant | gi\|3643809 | 1 | 930 | 100 | 100 | H2MBU62 | |
| | | 1 [Homo sapiens]>gi\|3643811 (AF062347) zinc | | | | | | | |
| | | finger protein 216 splice variant 2 [Homo | | | | | | | |
| | | sapiens]>gi\|3668066 (AF062072) zinc finger | | | | | | | |
| | | protein 216 [Homo sapiens]>sp\|O76080\|O76080 | | | | | | | |
| | | ZINC FINGER PROTEIN 216. >bbs | | | | | | | |
| 405 | 830127 | thymopoietin alpha [Homo sapiens] | gi\|508725 | 469 | 1074 | 77 | 78 | H2MBT25 | |
| | | >pir\|A55741\|A55741 thymopoietin alpha | | | | | | | |
| | | precursor-human Length = 694 | | | | | | | |
| 406 | 830128 | | | 102 | 770 | | | H2CBH25 | |
| 407 | 830129 | subunit of coatomer complex [Homo sapiens] | gi\|298097 | 3 | 2234 | 100 | 100 | H2CBU57 | |
| | | >sp\|P35606\|COPP_HUMAN COATOMER | | | | | | | |
| | | BETA'SUBUNIT (BETA'-COAT PROTEIN) | | | | | | | |
| | | (BETA'-COP) (P102). {SUB 2-906} Length = | | | | | | | |
| | | 906 | | | | | | | |
| 408 | 830137 | aldehyde dehydrogenase [Homo sapiens] | gi\|1263008 | 2 | 943 | 95 | 95 | H2CBX43 | |
| | | >sp\|P30837\|DHA5_HUMAN ALDEHYDE | | | | | | | |
| | | DEHYDROGENASE, MITOCHONDRIAL X | | | | | | | |
| | | PRECURSOR (EC 1.2.1.3) (CLASS 2). Length = | | | | | | | |
| | | 517 | | | | | | | |
| 409 | 830140 | retroviral proteinase-like protein-human | pir\|JE0065\|JE0065 | 347 | 784 | 100 | 100 | H2CBG30 | |
| | | (fragment) Length = 165 | | | | | | | |
| 410 | 830157 | (AF043735) 14-3-3 epsilon [Bos taurus] | gi\|3676399 | 2 | 889 | 99 | 99 | H2CBB64 | |
| | | >gi\|984319 epsilon 14-3-3 protein [Homo | | | | | | | |
| | | sapiens]>gnl\|PID\|d1033501 (AB017103) 14-3-3 | | | | | | | |
| | | epsilon [Homo sapiens]>gi\|902787 14-3-3 | | | | | | | |
| | | protein epsilon isoform [Homo sapiens] | | | | | | | |
| | | \|gi\|1184725 14-3-3 protein epsilon isoform | | | | | | | |
| | | [Homo sa | | | | | | | |
| 411 | 830195 | 90kDa heat shock protein [Homo sapiens] | gi\|306891 | 80 | 631 | 93 | 94 | HWACG91 | |
| | | >pir\|A29461\|HHHU84 heat shock protein 90- | | | | | | | |
| | | beta-human >sp\|P08238\|HS9B_HUMAN | | | | | | | |
| | | HEAT SHOCK PROTEIN HSP 90-BETA (HSP | | | | | | | |
| | | 84) (HSP 90). {SUB 2-724} Length = 724 | | | | | | | |
| 412 | 830196 | 90kDa heat shock protein [Homo sapiens] | gi\|306891 | 19 | 1263 | 100 | 100 | H2CAC90 | |
| | | >pir\|A29461\|HHHU84 heat shock protein 90- | | | | | | | |
| | | beta-human >sp\|P08238\|HS9B_HUMAN | | | | | | | |
| | | HEAT SHOCK PROTEIN HSP 90-BETA (HSP | | | | | | | |
| | | 84) (HSP 90). {SUB 2-724} Length = 724 | | | | | | | |
| 413 | 830409 | eIF3-p4O [Homo sapiens]>gi\|2351380 | gi\|2351380 | 325 | 1092 | 91 | 91 | HLDCQ28 | |
| | | translation initiation factor eIF3 p40 subunit | | | | | | | |
| | | [Homo sapiens]>sp\|O15372\|O15372 EIF3-P40. | | | | | | | |
| | | Length = 352 | | | | | | | |
| 414 | 830417 | core protein II precursor [Homo sapiens] | gi\|180928 | 115 | 744 | 81 | 82 | HMCBI54 | |
| | | >pir\|A32629\|A32629 ubiquinol-cytochrome-c | | | | | | | |
| | | reductase (EC 1.10.2.2) core protein II-human | | | | | | | |
| | | Length = 453 | | | | | | | |
| 415 | 830531 | 5'half of the product is homologues to Bacillus | gi\|28384 | 112 | 1059 | 100 | 100 | HMCGQ67 | |
| | | subtiis SAICAR synthetase, 3'half corresponds | | | | | | | |
| | | to the catalytic subunit of AIR carboxylase | | | | | | | |
| | | [Homo sapiens]>pir\|S14147\|S14147 | | | | | | | |
| | | multifunctional purine biosynthesis protein- | | | | | | | |
| | | human Length = 425 | | | | | | | |
| 416 | 830677 | pinin [Canis familiaris]>sp\|P79149\|P79149 | gi\|1684845 | 8 | 1111 | 88 | 88 | HLWBS80 | |
| | | PININ. Length = 773 | | | | | | | |
| 417 | 831355 | GTP-binding protein-mouse Length = 198 | pir\|S39543\|S39543 | 128 | 730 | 99 | 100 | HKMAB33 | |
| 418 | 831420 | (AB016869) p70 ribosomal S6 kinase beta | gnl\|PID\|d10353831 | 672 | 91 | 92 | | HWBAS06 | |
| | | [Homo sapiens]>sp\|D1035383\|D1035383 P70 | | | | | | | |
| | | RIBOSOMAL S6 KINASE BETA. Length = 495 | | | | | | | |
| 419 | 831702 | Gem [Homo sapiens]>pir\|A54575\|A54575 35K | gi\|544493 | 100 | 1107 | 93 | 93 | H2LAD84 | |
| | | GTP-binding protein Gem-human | | | | | | | |
| | | >sp\|P55040\|GEM_HUMAN GTP-BINDING | | | | | | | |
| | | PROTEIN GEM (GTP-BINDING MITOGEN- | | | | | | | |
| | | INDUCED T-CELL PROTEIN) (RAS-LIKE | | | | | | | |
| | | PROTETN KR). Length = 296 | | | | | | | |
| 420 | 831717 | ets2 protein [Homo sapiens]>gi\|2736087 | gi\|182273 | 278 | 1309 | 90 | 90 | HLLBB45 | |
| | | (AF017257) erythroblastosis virus oncogene | | | | | | | |
| | | homolog 2 protein [Homo sapiens] | | | | | | | |
| | | >pir\|B32066\|TVHUE2 transcription factor ets-2- | | | | | | | |
| | | human >sp\|P15036\|ETS2_HUMAN C-ETS-2 | | | | | | | |
| | | PROTEIN. >gi\|182271 ets protein [Homo | | | | | | | |
| | | sapiens] {SUB 324 | | | | | | | |
| 421 | 832488 | tissue-specific secretory protein [unidentified] | gi\|583141 | 24 | 434 | 98 | 100 | HKMLZ60 | |
| | | >gi\|32051 HE4 protein [Homo sapiens] | | | | | | | |
| | | >pir\|S25454\|S25454 HE4 protein-human | | | | | | | |
| | | >sp\|Q14508\|EP4_HUMAN MAJOR | | | | | | | |
| | | EPIDIDYMIS-SPECIFIC PROTEIN E4 | | | | | | | |
| | | PRECURSOR (HE4) (EPIDIDYMAL | | | | | | | |
| | | SECRETORY PROTEIN E4). Length = 125 | | | | | | | |
| 422 | 833207 | secretory granule proteoglycan peptide core | gi\|190420 | 57 | 542 | 81 | 81 | HWAFH33 | |
| | | [Homo sapiens]>gi\|338062 proteoglycan | | | | | | | |
| | | secretory granule 1 [Homo sapiens]>gi\|32433 | | | | | | | |
| | | hematopoetic proteoglycan core protein (AA 1- | | | | | | | |
| | | 158) [Homo sapiens]>pir\|A35183\|A28058 | | | | | | | |
| | | secretory granule proteoglycan core prote | | | | | | | |
| 423 | 835940 | putative RabS-interacting protein (clone L1-57} | bbs\|180090 | 126 | 464 | 78 | 81 | HNFHV44 | |
| | | [human, HeLa cells, Peptide Partial, 122 aa] | | | | | | | |
| | | [Homo sapiens] | | | | | | | |
| 424 | 836953 | GTP-binding protein [Homo sapiens] | gi\|550072 | 388 | 1038 | 99 | 99 | HMEFS23 | |
| | | >pir\|G34323\|G34323 GTP-binding protein Rab6- | | | | | | | |
| | | human | | | | | | | |
| 425 | 837105 | | | 860 | 1168 | | | HL1AS90 | |
| 426 | 837300 | | | 276 | 494 | | | HODHJ94 | |
| 427 | 837373 | ribosomal protein L5 [Homo sapiens] | gi\|550013 | 1 | 714 | 98 | 98 | HIASC92 | |
| | | >pirISS59l2ISSS9l2 ribosomal protein L5, | | | | | | | |
| | | cytosolic - human >gi\|1658S78 ribosomal L5 | | | | | | | |
| | | protein [Homo sapiens]{SUB 153-297 }Length | | | | | | | |
| | | = 297 | | | | | | | |
| 428 | 837687 | protein trafficking protein [Homo sapiens] | gi\|1407826 | 435 | 953 | 98 | 98 | HSLBF05 | |
| | | >gnl\|PID\|e239969 trausmembrane protein [Homo | | | | | | | |
| | | sapiens]>gnl\|PID\|e1309760 (AJ004913) integral | | | | | | | |
| | | membrane protein, Tmp21-I (p23) [Homo | | | | | | | |
| | | sapiens]>pir\|G01159\|G01159 protein trafficking | | | | | | | |
| | | protein tmp21-I-human >sp\|E13097 | | | | | | | |
| 429 | 837991 | | | 1 | 294 | | | HPJCY94 | |
| 430 | 838442 | procollagen C-proteinase [Homo sapiens] | gi\|1245357 | 3 | 506 | 97 | 97 | HAUBJ52 | |
| | | >sp\|Q13292\|Q13292 PROCOLLAGEN C- | | | | | | | |
| | | PROTEINASE. Length = 986 | | | | | | | |
| 431 | 840541 | cyclin C [Homo sapiens]>pir\|A40268\|A40268 | gi\|1117984 | 127 | 549 | 99 | 100 | HWHQA57 | |
| | | cyclin C-human >sp\|P24863\|CG1C_HUMAN | | | | | | | |
| | | G1/S-SPECIEIC CYCLIN C. Length = 303 | | | | | | | |
| 432 | 840543 | (AF016369) U4/U6 small nuclear | gi\|2708305 | 40 | 1020 | 94 | 94 | HWBEJ29 | |
| | | ribonucleoprotein hPrp4 [Homo sapiens] | | | | | | | |
| | | >sp\|O43445\|O43445 U4/U6 SMALL NUCLEAR | | | | | | | |
| | | RIBONUCLEOPROTEIN HPRP4. Length = 522 | | | | | | | |
| 433 | 840550 | | | 1 | 141 | | | HWBFM54 | |
| 434 | 840563 | | | 382 | 723 | | | HADFY02 | |
| 435 | 840565 | AZ-1 [Mus musculus]>gnl\|PID\|d1008454 pre- | gnl\|PID\|d1019745 | 1 | 300 | 71 | 88 | HIHGCW14 | |
| | | acrosome localization protein [Mus musculus] | | | | | | | |
| | | >pir\|S63993\|S63993 acrosomal protein AZ1- | | | | | | | |
| | | mouse >sp\|Q62036\|Q62036 5-AZACYTIDINE | | | | | | | |
| | | INDUCED PROTEIN (PRE-ACROSOME | | | | | | | |
| | | LOCALIZATION PROTEIN). Length = 1060 | | | | | | | |
| 436 | 840569 | | | 2 | 136 | | | HPRBG41 | |
| 437 | 840570 | p116Rip [Mus musculus]>sp\|P97434\|P97434 | gi\|1657837 | 2 | 691 | 90 | 91 | HOEDH35 | |
| | | P116RIP. Length = 1024 | | | | | | | |
| 438 | 840571 | | | 873 | 1097 | | | HIBCA19 | |
| 439 | 840573 | S-adenosyl homocysteine hydrolase homolog | gi\|2852125 | 3 | 719 | 74 | 74 | HYAAB09 | |
| | | [Homo sapiens]Length = 500 | | | | | | | |
| 440 | 840574 | | | 2 | 292 | | | HWLBN43 | |
| 441 | 840575 | KERATIN, TYPE I CYTOSKELETAL 10 | sp\|P13645\|K1CJ_HU | 3 | 1856 | 100 | 100 | HWEADS2 | |
| | | (CYTOKERATIN 10) (K1O) (CK 10). | MAN | | | | | | |
| | | >sp\|G244509\|G244509 KERATIN 10 V2 | | | | | | | |
| | | SUBDOMAIN 142 AMINO ACID VARIANT. | | | | | | | |
| | | {SUB 452-593 } Length = 593 | | | | | | | |
| 442 | 840579 | | | 50 | 1549 | | | HAPBL12 | |
| 443 | 840580 | | | 343 | 867 | | | HWLFE67 | |
| 444 | 840581 | | | 21 | 191 | | | HYAAY95 | |
| 445 | 840605 | (AJ000480) phosphoprotein [Homo sapiens] | gnl\|PID\|e329709 | 3 | 170 | 97 | 97 | HWTAH85 | |
| | | >sp\|O15180\|O15180 PHOSPHOPROTEIN | | | | | | | |
| | | (FRAGMENT). Length = 224 | | | | | | | |
| 446 | 840607 | alpha-adaptin (A) (AA 1-977) [Mus musculus] | gi\|498783 | 317 | 98 | 98 | | HTYSE72 | |
| | | >pir\|A3O111\|A30111 alpha-adaptin A-mouse | | | | | | | |
| | | >sp\|P17426\|ADAA_MOUSE ALPHA- | | | | | | | |
| | | ADAPTIN A (CLATHRIN ASSEMBLY | | | | | | | |
| | | PROTEIN COMPLEX 2 ALPHA-A LARGE | | | | | | | |
| | | CHAIN) (100 KD COATED VESICLE | | | | | | | |
| | | PROTEIN A) (PLASMA MEMBRANE | | | | | | | |
| | | ADAPTOR HA2/AP2 ADAPT | | | | | | | |
| 447 | 840609 | olfactomedin [Rana catesbeiana] | gi\|294502 | 1 | 201 | 46 | 75 | HUFBD83 | |
| | | >pir\|A47442\|A47442 olfactomedin precursor- | | | | | | | |
| | | bullfrog >sp\|Q07081\|OLFM_RANCA | | | | | | | |
| | | OLFACTOMEDIN PRECURSOR | | | | | | | |
| | | (OLFACTORY MUCUS PROTEIN). Length = | | | | | | | |
| | | 464 | | | | | | | |
| 448 | 840610 | plakoglobin [Homo sapiens]>sp\|Q15151\|Q15151 | gnl\|PID\|e214034 | 1784 | 2818 | 94 | 94 | HBGNU40 | |
| | | PLAKOGLOBIN. >gnl\|PID\|d1010077 | | | | | | | |
| | | plakoglobin [Homo sapiens]{SUB 239-409} | | | | | | | |
| | | Length = 745 | | | | | | | |
| 449 | 840611 | | | 657 | 848 | | | HUEAT62 | |
| 450 | 840612 | B-IND1 protein [Mus musculus] | gnl\|PID\|e1192419 | 130 | 1242 | 85 | 86 | HWLFV07 | |
| | | >sp\|O09003\|O09003 B-IND1 PROTEIN. Length = | | | | | | | |
| | | 189 | | | | | | | |
| 451 | 840615 | casein kinase II alpha subunit [Bos taurus] | gi\|162777 | 140 | 1234 | 94 | 94 | HUKDT16 | |
| | | >gi\|611 casein kinase alpha subunit [Bos taurus] | | | | | | | |
| | | >gi\|177994 casein kinase II alpha subunit [Homo | | | | | | | |
| | | sapiens]>gi\|598147 casein kinase II alpha | | | | | | | |
| | | subunit [Homo sapiens]>pir\|A30319\|A30319 | | | | | | | |
| | | casein kinase II (EC 2.7.1.-) | | | | | | | |
| 452 | 840622 | | | 135 | 962 | | | HTXNQ26 | |
| 453 | 840623 | 1,4-alpha-glucan branching enzyme [Homo | gi\|184026 | 3 | 542 | 97 | 98 | HTTEK41 | |
| | | sapiens]>pir\|A46075\|A46075 glycogen | | | | | | | |
| | | branching enzyme-human | | | | | | | |
| | | >sp\|Q04446\|GLGB_HUMAN 1,4-ALPHA- | | | | | | | |
| | | GLUCAN BRANCHING ENZYME (EC | | | | | | | |
| | | 2.4.1.18) (GLYCOGEN BRANCHING | | | | | | | |
| | | ENZYME) (BRANCHER ENZYME). Length = | | | | | | | |
| | | 702 | | | | | | | |
| 454 | 840624 | | | 1065 | 1550 | | | HTXBO36 | |
| 455 | 840631 | (AL033514) predicted using Genefinder; cDNA | gnl\|PID\|e1358418 | 3 | 1250 | 53 | 73 | HTTDU70 | |
| | | EST yk465c 10.5 comes from this gene | | | | | | | |
| | | [Caenorhabditis elegans] | | | | | | | |
| | | >5p1E13584181E1358418 Y75B8A. 16 PROTEIN. | | | | | | | |
| | | Length = 431 | | | | | | | |
| 456 | 840632 | | | 1241 | 1453 | | | HTTFY74 | |
| 457 | 840633 | | | 1 | 612 | | | HTTFA16 | |
| 458 | 840634 | | | 232 | 438 | | | HTTFG83 | |
| 459 | 840635 | | | 35 | 748 | | | HTXBW79 | |
| 460 | 840636 | | | 134 | 382 | | | HTWBE73 | |
| 461 | 840637 | | | 315 | 551 | | | HTTEZ16 | |
| 462 | 840639 | | | 1035 | 1700 | | | HTTET75 | |
| 463 | 840640 | (AC004684) putative ribotol dehydrogenase | gi\|3236237 | 2 | 418 | 31 | 50 | HTQDA44 | |
| | | [Arabidopsis thaliana]>sp\|O80924\|O80924 | | | | | | | |
| | | PUTATIVE RIBOTOL DEHYDROGENASE. | | | | | | | |
| | | Length = 321 | | | | | | | |
| 464 | 840650 | | | 86 | 940 | | | HTPAG74 | |
| 465 | 840652 | spermatid perinuclear RNA binding protein [Mus | gi\|673454 | 1 | 588 | 89 | 89 | HTTCB17 | |
| | | musculus]>pir\|A57284\|A57284 spermatid | | | | | | | |
| | | perinuclear RNA-binding protein Spnr-mouse | | | | | | | |
| | | >sp\|Q62262\|Q62262 SPERMATID | | | | | | | |
| | | PERINUCLEAR RNA-BINDING PROTEIN. | | | | | | | |
| | | Length = 648 | | | | | | | |
| 466 | 840653 | | | 3 | 989 | | | HTTDG56 | |
| 467 | 840655 | | | 1 | 2139 | | | HTPCP50 | |
| 468 | 840659 | (AF016507) C-terminal binding protein 2 [Homo | gi\|2909777 | 511 | 1518 | 89 | 89 | HTSHI54 | |
| | | sapiens]>sp\|P56545\|CTB2_HUMAN C- | | | | | | | |
| | | TERMINAL BINDING PROTEIN 2. Length = | | | | | | | |
| | | 445 | | | | | | | |
| 469 | 840660 | | | 293 | 520 | | | HTOJF77 | |
| 470 | 840661 | | | 3 | 710 | | | HTLGP71 | |
| 471 | 840662 | cleavage signal 1 protein [Homo sapiens] | gi\|181123 | 494 | 1333 | 90 | 92 | HTOEY44 | |
| | | >pir\|JH0629\|JH0629 cleavage signal-1 protein- | | | | | | | |
| | | human >sp\|P28290\|CS1_HUMAN CLEAVAGE | | | | | | | |
| | | SIGNAL-1 PROTEIN (CS-1). Length = 249 | | | | | | | |
| 472 | 840663 | | | 179 | 466 | | | HTPBY35 | |
| 473 | 840670 | | | 1132 | 1647 | | | HTTBJ61 | |
| 474 | 840671 | | | 210 | 1001 | | | HTJMJ95 | |
| 475 | 840672 | (AF037448) Gry-rbp [Homo sapiens] | gi\|3037013 | 3 | 1739 | 99 | 99 | HTHDF09 | |
| | | >sp\|060506\|060506 GRY-RBP. Length = 623 | | | | | | | |
| 476 | 840673 | complement component C1s [Homo sapiens] | gi\|179646 | 1 | 690 | 98 | 98 | HTJAA66 | |
| | | >gi\|179648 complement subcomponent C1s | | | | | | | |
| | | precursor [Homo sapiens]>gi\|763110 | | | | | | | |
| | | complement protein C1s precursor [Homo | | | | | | | |
| | | sapiens]>pir\|A40496\|C1HUS complement | | | | | | | |
| | | subcomponent C1s (EC 3.4.21.42) precursor- | | | | | | | |
| | | human >sp\|P09871\|C1 | | | | | | | |
| 477 | 840674 | glypican [Homo sapiens]>pir\|A36347\|A36347 | gi\|31847 | 208 | 525 | 87 | 87 | HTLDZ68 | |
| | | glypican 1 precursor-human | | | | | | | |
| | | >sp\|P35052\|GLYP_HUMAN GLYPICAN-1 | | | | | | | |
| | | PRECURSOR. Length = 558 | | | | | | | |
| 478 | 840677 | | | 237 | 1010 | | | HTJNE24 | |
| 479 | 840678 | | | 3 | 842 | | | HTGFX11 | |
| 480 | 840680 | Similarity to H.influenza ribonuclease PH | gnl\|PID\|e1343517 | 115 | 555 | 48 | 72 | HTLEI30 | |
| | | (SW:RNPH_HAEIN); | | | | | | | |
| 481 | 840691 | polynucleotide adenylyltransferase [Bos taurus] | gi\|605 | 1 | 900 | 68 | 70 | HTEKG75 | |
| | | \|sp\|P25500\|PAP_BOVIN POLY(A) | | | | | | | |
| | | POLYMERASE (EC 2.7.7.19) (PAP) | | | | | | | |
| | | (POLYNUCLEOTIDE | | | | | | | |
| | | ADENYLYLTRANSFERASE). {SUB 2-739} | | | | | | | |
| | | Length = 739 | | | | | | | |
| 482 | 840700 | | | 54 | 998 | | | HTELT78 | |
| 483 | 840701 | | | 879 | 1370 | | | HDQDW52 | |
| 484 | 840702 | | | 713 | 955 | | | HTEJY89 | |
| 485 | 840705 | | | 106 | 621 | | | HTELU22 | |
| 486 | 840715 | stanniocalcin [Homo sapiens]>gi\|975298 | gi\|1199620 | 1 | 828 | 99 | 99 | HSYBK03 | |
| | | stanniocalcin precursor [Homo sapiens] | | | | | | | |
| | | >sp\|P52823\|CSTP_HUMAN STANNIOCALCIN | | | | | | | |
| | | PRECURSOR. | | | | | | | |
| 487 | 840717 | | | 561 | 1058 | | | HSSNA42 | |
| 488 | 840718 | (AC005154) similar to protein U28928 | gi\|3242764 | 227 | 562 | 98 | 98 | HSSMV32 | |
| | | (PID:g861306) [Homo sapiens] | | | | | | | |
| | | >sp\|O75223\|O75223 WUGSC:H_DJ0777023.1 | | | | | | | |
| | | PROTEIN. Length = 188 | | | | | | | |
| 489 | 840719 | | | 3 | 284 | | | HSSNB31 | |
| 490 | 840724 | metallothionein I-F [Homo sapiens]>gi\|386866 | gi\|386867 | 226 | 510 | 100 | 100 | HSVBQ73 | |
| | | human metallothionein-If [Homo sapiens] | | | | | | | |
| | | >pir\|B22634\|SMHU1F metallothionein 1F- | | | | | | | |
| | | human >sp\|P04733\|MT1F_HUMAN | | | | | | | |
| | | METALLOTHIONEIN-IF (MT-1F) Length = 61 | | | | | | | |
| 491 | 840725 | Unknown | | 1259 | 1501 | | | HSRDA46 | |
| 492 | 840727 | | | 4 | 606 | | | HSXCO55 | |
| 493 | 840731 | apg-2 [Mus musculus] | gnl\|PID\|d1013599 | 22 | 471 | 69 | 75 | HSSAO67 | |
| | | >sp\|Q61316\|HS74_MOUSE HEAT SHOCK 70- | | | | | | | |
| | | RELATED PROTEIN APG-2. Length = 841 | | | | | | | |
| 494 | 840733 | | | 3 | 437 | | | HSSGG96 | |
| 495 | 840734 | | | 228 | 365 | | | HSRFE65 | |
| 496 | 840736 | small nuclear ribonucleic protein [Homo sapiens] | gi\|338259 | 58 | 342 | 100 | 100 | HSRFE95 | |
| | | Length = 92 | | | | | | | |
| 497 | 840737 | | | 3 | 341 | | | HSSFS95 | |
| 498 | 840739 | | | 196 | 561 | | | HSLJW05 | |
| 499 | 840746 | similar to mouse CC1. [Homo sapiens] | gnl\|PID\|d1013883 | 452 | 1420 | 85 | 85 | HSLII31 | |
| | | >sp\|Q92601\|Q92601 MYELOBLAST | | | | | | | |
| | | KIAA0202. Length = 1591 | | | | | | | |
| 500 | 840748 | cytoplasmic antiproteinase, CAP=38 kda | bbs\|145232 | 65 | 1441 | 96 | 96 | HSRGX11 | |
| | | intracellular serine proteinase inhibitor [human, | | | | | | | |
| | | placenta, Peptide, 376 aa] [Homo sapiens] | | | | | | | |
| | | Length = 376 | | | | | | | |
| 501 | 840750 | (AC002339) putative ABC transporter | gi\|2335109 | 507 | 845 | 34 | 62 | HSODA53 | |
| | | [Arabidopsis thaliana]>sp\|O22950\|O22950 ABC | | | | | | | |
| | | TRANSPORTER ISOLOG, 3′PARTIAL | | | | | | | |
| | | (FRAGMENT). Length = 664 | | | | | | | |
| 502 | 840751 | MYOSIN LIGHT CHAIN KINASE, SMOOTH | sp\|Q15746\|KMLS_HUMAN | 3 | 2519 | 90 | 90 | HTEFV12 | |
| | | MUSCLE AND NON-MUSCLE ISOZYMES | UMAN | | | | | | |
| | | (EC 2.7.1.117) (MLCK) [CONTAINS: | | | | | | | |
| | | TELOKIN]. Length = 1913 | | | | | | | |
| 503 | 840757 | (AB005624) rig-analog DNA-binding protein | gnl\|PID\|d1022359 | 236 | 568 | 100 | 100 | HKBAL84 | |
| | | [Sus scrofa]>gi\|306898 rig-analog protein | | | | | | | |
| | | (putative); putative [Homo sapiens]>gi\|337416 | | | | | | | |
| | | human homologue of rat insulinoma gene (rig); | | | | | | | |
| | | putative [Homo sapiens] | | | | | | | |
| 504 | 840759 | transcription factor ZFM1 [Homo sapiens] | gi\|1100209 | 481 | 2073 | 100 | 100 | HSLDB56 | |
| | | >sp\|Q15913\|Q15913 TRANSCRIPTION | | | | | | | |
| | | FACTOR ZFM1. Length = 571 | | | | | | | |
| 505 | 840760 | | | 233 | 529 | | | HSKDG51 | |
| 506 | 840770 | FORMATE ACETYLTRANSFERASE 2 (EC | sp\|D1036490\|D1036490 | 1 | 195 | 100 | 100 | HSLCS52 | |
| | | 2.3.1.54) (PYRUVATE FORMATE-LYASE 2) | | | | | | | |
| | | (FRAGMENT). Length = 716 | | | | | | | |
| 507 | 840781 | glyoxaslase I [Homo sapiens]>gnl\|PID\|d1003075 | gi\|183258 | 107 | 673 | 99 | 99 | HSKHK35 | |
| | | lactoyl glutathione lyase [Homo sapiens] | | | | | | | |
| | | >pir\|A46714\|A46714 lactoylglutathione lyase | | | | | | | |
| | | (EC 4.4.1.5)-human | | | | | | | |
| 508 | 840789 | (AC003003) Homolog of rat B/K protein product | gi\|2865208 | 1 | 657 | 93 | 93 | HHPSF20 | |
| | | [Homo sapiens]>sp\|O43330\|O43330 HUMAN | | | | | | | |
| | | HOMOLOGUE OF RAT B/K PROTEIN | | | | | | | |
| | | PRODUCT (FRAGMENT). Length = 361 | | | | | | | |
| 509 | 840790 | | | 216 | 347 | | | HJKSC89 | |
| 510 | 840791 | | | 2 | 817 | | | HHSGD58 | |
| 511 | 840798 | polynucleotide phosphorylase (PNPase) [Bacillus | gnl\|PID\|e1185260 | 2 | 493 | 41 | 66 | HHERQ85 | |
| | | subtilis]>gi\|1184680 polynucleotide | | | | | | | |
| | | phosphorylase [Bacillus subtilis] | | | | | | | |
| | | >pir\|S70691\|S70691 polyribonucleotide | | | | | | | |
| | | nucleotidyltransferase (EC 2.7.7.8) alpha chain | | | | | | | |
| | | pnpA-Bacillus subtilis | | | | | | | |
| | | >sp\|P50849\|PNPA_BACSU POL | | | | | | | |
| 512 | 840802 | (AB001915) NG,NG-dimethylarginine | gnl\|PID\|d1038106 | 1 | 618 | 97 | 98 | HHFES15 | |
| | | dimethylaminohydrolase [Homo sapiens]Length = | | | | | | | |
| | | 285 | | | | | | | |
| 513 | 840803 | zinc finger protein [Molgula oculata] | gi\|308967 | 1 | 1935 | 36 | 63 | HHERC56 | |
| | | >sp\|Q25473\|Q25473 ZINC FINGER PROTEIN. | | | | | | | |
| | | Length = 558 | | | | | | | |
| 514 | 840809 | | | 2 | 208 | | | HHEPE84 | |
| 515 | 840811 | | | 1 | 690 | | | HHFBP51 | |
| 516 | 840813 | | | 2 | 214 | | | HHEMJ45 | |
| 517 | 840814 | (AL022162) dJ454M7.1.1 (Lowe | gnl\|PID\|e1371023 | 2 | 154 | 100 | 100 | HGBIC73 | |
| | | Oculocerebrorenal Syndrome protein OCRL-1) | | | | | | | |
| | | (isoform 1) [Homo sapiens]>gnl\|PID\|e244699 | | | | | | | |
| | | Lowe oculocerebrorenal syndrome (OCRL) | | | | | | | |
| | | [Homo sapiens] {SUB 336-813} Length = 813 | | | | | | | |
| 518 | 840817 | (AB004903) STAT induced STAT inhibitor-2 | dbj\|\|AB004903_1 | 85 | 864 | 99 | 99 | HHEBI06 | |
| | | [Homo sapiens]>gi\|3265033 (AF037989) STAT- | | | | | | | |
| | | induced STAT inhibitor-2 [Homo sapiens] | | | | | | | |
| | | >sp\|O14508\|O14508 STAT INDUCED STAT | | | | | | | |
| | | INHIBITOR-2. Length = 198 | | | | | | | |
| 519 | 840825 | | | 2 | 436 | | | HHEAB14 | |
| 520 | 840826 | | | 2022 | 2360 | | | HHBFD61 | |
| 521 | 840827 | | | 14 | 817 | | | HHEAH66 | |
| 522 | 840828 | Cleavage and Polyadenylation Specifity Factor | gnl\|PID\|e225428 | 2 | 1180 | 98 | 99 | HHEAK56 | |
| | | protein [Bos taurus]>sp\|P79101\|P79101 | | | | | | | |
| | | CLEAVAGE AND POLYADENYLATION | | | | | | | |
| | | SPECIFITY FACTOR PROTEIN. Length = 684 | | | | | | | |
| 523 | 840829 | | | 130 | 618 | | | HFVIE96 | |
| 524 | 840831 | | | 1166 | 1447 | | | HFXCN75 | |
| 525 | 840836 | | | 18 | 566 | | | HFXKK43 | |
| 526 | 840837 | (AC005757) R32611_2 [Homo sapiens] | gi\|3688090 | 322 | 759 | 62 | 80 | HGBAG76 | |
| | | >sp\|O75865\|O75865 R32611_2 (FRAGMENT). | | | | | | | |
| | | Length = 160 | | | | | | | |
| 527 | 840838 | (AF006386) axonemal dynein light chain [Homo | gi\|2352534 | 2 | 832 | 100 | 100 | HFXJP72 | |
| | | sapiens]>sp\|O14645\|O14645 AXONEMAL | | | | | | | |
| | | DYNEIN LIGHT CHAIN. Length = 257 | | | | | | | |
| 528 | 840841 | | | 2 | 790 | | | HGAMD29 | |
| 529 | 840842 | | | 216 | 791 | | | HFPCK56 | |
| 530 | 840843 | | | 12 | 791 | | | HFVGM54 | |
| 531 | 840845 | | | 669 | 1031 | | | HGBBY80 | |
| 532 | 840847 | | | 151 | 1044 | | | HFPCN94 | |
| 533 | 840851 | | | 470 | 2047 | | | HFOXS46 | |
| 534 | 840853 | | | 15 | 224 | | | HFOXV75 | |
| 535 | 840854 | | | 149 | 1183 | | | HFPBK03 | |
| 536 | 840858 | (AC002333) molybdenum cofactor biosynthesis | gi\|2281094 | 249 | 833 | 41 | 51 | HFPCP42 | |
| | | protein E isolog [Arabidopsis thaliana] | | | | | | | |
| | | >sp\|O22827\|O22827 MOLYBDENUM | | | | | | | |
| | | COFACTOR BIOSYNTHESIS PROTEIN E | | | | | | | |
| | | ISOLOG. Length = 198 | | | | | | | |
| 537 | 840859 | Gu protein [Homo sapiens]>pir\|PC6010\|PC6010 | gi\|1230564 | 3 | 1163 | 63 | 74 | HFOYQ50 | |
| | | RNA helicase Gu-human (fragment) | | | | | | | |
| | | >sp\|Q13436\|Q13436 NUCLEOLAR RNA | | | | | | | |
| | | HELICASE GU (FRAGMENT). Length = 801 | | | | | | | |
| 538 | 840863 | | | 1 | 165 | | | HFIIW33 | |
| 539 | 840868 | argininosuccinate lyase [Homo sapiens] | gi\|179089 | 2 | 1678 | 99 | 99 | HFKEN53 | |
| | | >gi\|179091 argininosuccinate lyase [Homo | | | | | | | |
| | | sapiens]>pir\|A31658\|WZHURS | | | | | | | |
| | | argininosuccinate lyase (EC 4.3.2.1)-human | | | | | | | |
| | | Length = 464 | | | | | | | |
| 540 | 840869 | (AF064244) intersectin long form [Homo | gi\|3859855 | 33 | 632 | 74 | 88 | HFKEG36 | |
| | | sapiens]>sp\|G3859855\|G3859855 | | | | | | | |
| | | INTERSECTIN LONG FORM. >gi\|3859853 | | | | | | | |
| | | (AF064243) intersectin short form [Homo | | | | | | | |
| | | sapiens] {SUB 1-1220} >gi\|3930533 | | | | | | | |
| | | (AF064247) intersectin long form [Homo | | | | | | | |
| | | sapiens] {SUB 1209-1263} Length = 172 | | | | | | | |
| 541 | 840870 | | | 505 | 831 | | | HFKFN13 | |
| 542 | 840875 | | | 3 | 617 | | | HFITH86 | |
| 543 | 840876 | (AC004392) Contains similarity to gb\|U51898 | gi\|3367519 | 1 | 1110 45 | 70 | | HFIZQ25 | |
| | | Ca2+-independent phospholipase A2 from Rattus | | | | | | | |
| | | norvegicus. [Arabidopsis thaliana] | | | | | | | |
| | | >sp\|O80693\|O80693 F8K4.6 PROTEIN. Length = | | | | | | | |
| | | 1265 | | | | | | | |
| 544 | 840881 | histone H2B.1 [Homo sapiens] | gi\|184080 | 3 | 449 | 77 | 77 | HFIIR54 | |
| | | >gnl\|PID\|e1301465 (AJ223353) Histone H2B | | | | | | | |
| | | [Homo sapiens]>gi\|51306 histone H2B-291B | | | | | | | |
| | | (AA 1 -126) [Mus musculus] | | | | | | | |
| | | >pir\|S04153\|S04153 histone H2B (clone 291B)- | | | | | | | |
| | | mouse >pir\|F40335\|F40335 histone H2B.1 (b)- | | | | | | | |
| | | human >sp\|E1301465\|E1301 | | | | | | | |
| 545 | 840883 | | | 3 | 428 | | | HFIHA80 | |
| 546 | 840886 | (AJ000506) Homeodomain protein Meis2c [Mus | gnl\|PID\|e330082 | 71 | 964 | 90 | 90 | HHPDW66 | |
| | | musculus]>sp\|P97367\|MEI2_MOUSE | | | | | | | |
| | | HOMEOBOX PROTEIN MEIS2 (MEIS1- | | | | | | | |
| | | RELATED PROTEIN 1). Length = 477 | | | | | | | |
| 547 | 840887 | | | 1202 | 1600 | | | HFIIR82 | |
| 548 | 840891 | RNA polymerase I subunit A12.2 | gi\|172462 | 250 | 375 | 64 | 86 | HFCBQ77 | |
| | | [Saccharomyces cerevisiae]>gi\|1019685 ORF | | | | | | | |
| | | YJRO63w [Saccharomyces cerevisiae] | | | | | | | |
| | | >gi\|531231 RNA polymerase I A12.2 subunit | | | | | | | |
| | | [Saccharomyces cerevisiae]>gi\|1015737 ORF | | | | | | | |
| | | YJRO63w [Saccharomyces cerevisiae] | | | | | | | |
| | | >pir\|A48107\|A48107 DNA-dir | | | | | | | |
| 549 | 840892 | histone H2B [Homo sapiens]>pir\|I37445\|I37445 | gi\|31977 | 3 | 410 | 98 | 98 | HFEBK16 | |
| | | histone H2B.1-human | | | | | | | |
| | | >sp\|P33778\|H2B0_HUMAN HISTONE H2B.1. | | | | | | | |
| | | {SUB 2-126} Length = 126 | | | | | | | |
| 550 | 840894 | (AF002697) E1B 19 K/Bcl-2-binding protein | gi\|2511529 | 1 | 705 | 80 | 80 | HFIHO60 | |
| | | Nip3 [Homo sapiens]>sp\|O14620\|O14620 E1B | | | | | | | |
| | | 19K/BCL-2-BINDING PROTEIN NIP3. Length = | | | | | | | |
| | | 194 | | | | | | | |
| 551 | 840896 | Cdc73p [Saccharomyces cerevisiae] | gi\|632679 | 425 | 1249 | 28 | 57 | HFIAL02 | |
| | | >pir\|S59383\|S59383 probable membrane protein | | | | | | | |
| | | YLR418c-yeast (Saccharomyces cerevisiae) | | | | | | | |
| | | >sp\|Q06697\|Q06697 CHROMOSOME XII | | | | | | | |
| | | COSMID 9931. Length = 393 | | | | | | | |
| 552 | 840897 | syntaxin-4 [Homo sapiens]>gnl\|PID\|e332032 | gi\|758105 | 3 | 1142 | 100 | 100 | HFIAW49 | |
| | | (AJ000541) syntaxin 4 precursor [Homo sapiens] | | | | | | | |
| | | >gi\|2570870 (AF026007) syntaxin 4 [Homo | | | | | | | |
| | | sapiens]>pir\|S52726\|S52726 syntaxin-4-human | | | | | | | |
| | | Length = 297 | | | | | | | |
| 553 | 840898 | | | 2 | 265 | | | HFEBI76 | |
| 554 | 840904 | | | 396 | 1802 | | | HETIW62 | |
| 555 | 840905 | DNA fragmentation factor-45 [Homo sapiens] | gi\|2065561 | 3 | 1100 | 95 | 95 | HETBS69 | |
| | | >sp\|O00273\|DF45_HUMAN DNA | | | | | | | |
| | | FRAGMENTATION FACTOR-45 (DFF-45). | | | | | | | |
| | | Length = 331 | | | | | | | |
| 556 | 840908 | KIAA0156 gene product is related to Xenopus | gnl\|PID\|d1010577 | 348 | 2081 | 87 | 87 | HETCI63 | |
| | | nucleolin. [Homo sapiens]>sp\|Q15020\|Q15020 | | | | | | | |
| | | ORF. Length = 963 | | | | | | | |
| 557 | 840909 | 3-methyl-adenine DNA glycosylase [Homo | gnl\|PID\|e224269 | 2 | 949 | 94 | 94 | HEQAN83 | |
| | | sapiens] Length = 298 | | | | | | | |
| 558 | 840910 | | | 103 | 348 | | | HFKHD68 | |
| 559 | 840912 | | | 1530 | 1754 | | | HHPBB92 | |
| 560 | 840916 | MAL protein [Homo sapiens]>gi\|435478 MAL-a | gi\|307157 | 1 | 432 | 86 | 93 | HETJW92 | |
| | | gene product [Homo sapiens]>gnl\|PID\|e1192240 | | | | | | | |
| | | MAL [Homo sapiens]>pir\|A29472\|A29472 T- | | | | | | | |
| | | cell surface glycoprotein MAL, splice form a- | | | | | | | |
| | | human | | | | | | | |
| 561 | 840917 | | | 518 | 886 | | | HETIZ12 | |
| 562 | 840918 | (AF020038) NADP-dependent isocitrate | gi\|3641398 | 231 | 1508 | 99 | 99 | HAJCO38 | |
| | | dehydrogenase [Homo sapiens]>gi\|3641398 | | | | | | | |
| | | (AF020038) NADP-dependent isocitrate | | | | | | | |
| | | dehydrogenase [Homo sapien | | | | | | | |
| 563 | 840922 | | | 839 | 1033 | | | HELGB82 | |
| 564 | 840923 | | | 1044 | 1289 | | | HEQAN39 | |
| 565 | 840927 | | | 119 | 364 | | | HEMFU44 | |
| 566 | 840928 | | | 2 | 1258 | | | HEMCG01 | |
| 567 | 840929 | helix-loop-helix phosphoprotein [Homo sapiens] | gi\|292037 | 3 | 662 | 92 | 92 | HEOMQ95 | |
| | | >gi\|292055 helix-loop-helix phosphoprotein | | | | | | | |
| | | [Homo sapiens]>pir\|I53020\|I53020 G-0/G-1 | | | | | | | |
| | | switch regulatory protein 8-human | | | | | | | |
| | | >pir\|I65984\|I65984 helix-loop-helix | | | | | | | |
| | | phosphoprotein-human Length = 211 | | | | | | | |
| 568 | 840930 | (AF002282) alpha-actinin-2 associated LIM | gi\|3138924 | 3 | 1019 | 99 | 99 | HEGAD28 | |
| | | protein [Homo sapiens]>sp\|O60440\|O60440 | | | | | | | |
| | | ALPHA-ACTININ-2 ASSOCIATED LIM | | | | | | | |
| | | PROTEIN. Length = 316 | | | | | | | |
| 569 | 840931 | similar to thiolesterase; | gnl\|PID\|e1343797 | 1 | 1164 | 49 | 67 | HEMFC70 | |
| 570 | 840941 | | | 2 | 781 | | | HEGAL15 | |
| 571 | 840944 | cofactor E [Homo sapiens]>sp\|Q15813\|Q15813 | gi\|1465772 | 822 | 1685 | 98 | 98 | HELFC44 | |
| | | COFACTOR E. Length = 527 | | | | | | | |
| 572 | 840945 | | | 1067 | 1435 | | | HEEAS77 | |
| 573 | 840948 | lanosterol synthase [human, fetal liver, Peptide, | bbs\|176180 | 3 | 326 | 99 | 100 | HE9ST22 | |
| | | 732 aa] [Homo sapiens]>gnl\|PID\|d101O523 | | | | | | | |
| | | lanosterol synthase [Homo sapiens]>gi\|95 1314 | | | | | | | |
| | | 2,3-oxidosqualene-lanosterol cyclase [Homo | | | | | | | |
| | | sapiens]>pir\|JC4194\|JC4194 lanosterol synthase | | | | | | | |
| | | (EC 5.4.99.7)-human >sp\|P | | | | | | | |
| 574 | 840949 | (AJ005324) glutamate permease [synthetic | gnl\|PID\|e1360141 | 3 | 101 | 95 | 95 | HE9RM92 | |
| | | construct]>gnl\|PID\|e1360147 (AJ005327) | | | | | | | |
| | | glutamate permease [synthetic construct] | | | | | | | |
| | | >gnl\|PID\|e1360153 (AJ005330) glutamate | | | | | | | |
| | | permease [synthetic construct] Length = 459 | | | | | | | |
| 575 | 840953 | P43=mitochondrial elongation factor homolog | bbs\|160014 | 1 | 1437 | 100 | 100 | HELGM94 | |
| | | [human, liver, Peptide, 452 aa] [Homo sapiens] | | | | | | | |
| | | >pir\|I53499\|I53499 translation elongation factor | | | | | | | |
| | | TU-like protein P43, mitochondrial-human | | | | | | | |
| | | Length 452 | | | | | | | |
| 576 | 840954 | RNase L inhibitor (clone 8)-human Length = | pir\|S63672\|S63672 | 69 | 1949 | 95 | 95 | HE9HC20 | |
| | | 599 | | | | | | | |
| 577 | 840958 | FUSE binding protein 2 [Homo sapiens] | gi\|1575607 | 154 | 465 | 57 | 58 | HFLVB33 | |
| | | >sp\|Q92945\|Q92945 FUSE BINDING PROTEIN | | | | | | | |
| | | 2 (FRAGMENT). Length = 652 | | | | | | | |
| 578 | 840960 | phosphomannose isomerase [Homo sapiens] | gi\|416017 | 224 | 670 | 100 | 100 | HEEAD70 | |
| | | >pir\|S41122\|S41122 mannose-6-phosphate | | | | | | | |
| | | isomerase (EC 5.3.1.8)-human | | | | | | | |
| | | >sp\|P34949\|MANA_HUMAN MANNOSE-6- | | | | | | | |
| | | PHOSPHATE ISOMERASE (EC 5.3.1.8) | | | | | | | |
| | | (PHOSPHOMANNOSE ISOMERASE) (PMI) | | | | | | | |
| | | (PHOSPHOHEXOMUTASE). {SUB 2-423} | | | | | | | |
| | | Length = 423 | | | | | | | |
| 579 | 840968 | | | 375 | 2222 | | | HEBFH29 | |
| 580 | 840969 | | | 1054 | 1530 | | | HE9PB53 | |
| 581 | 840972 | | | 1 | 387 | | | HE8UU14 | |
| 582 | 840973 | | | 548 | 874 | | | HE9DH68 | |
| 583 | 840975 | | | 1 | 159 | | | HE9GO90 | |
| 584 | 840978 | | | 1433 | 1765 | | | HE9NG78 | |
| 585 | 840980 | nerve growth factor [Homo sapiens]>gi\|32031 | gi\|183890 | 75 | 833 | 90 | 90 | HEBFE14 | |
| | | pleiotrophin [Homo sapiens]>bbs\|119887 | | | | | | | |
| | | pleiotrophin, PTN [human, Peptide, 168 aa] | | | | | | | |
| | | [Homo sapiens]>bbs\|130735 heparin-binding | | | | | | | |
| | | neurite outgrowth promoting factor, HBNF | | | | | | | |
| | | {alternatively spliced} [human, Peptide, 16 | | | | | | | |
| 586 | 840982 | | | 81 | 359 | | | HE8ES49 | |
| 587 | 840985 | | | 3 | 830 | | | HE8UK50 | |
| 588 | 840989 | (AB016247) sterol-C5-desaturase [Homo | gnl\|PID\|d1034698 | 107 | 1027 | 99 | 100 | HE8FM74 | |
| | | sapiens]>sp\|O75845\|O75845 STEROL-C5- | | | | | | | |
| | | DESATURASE (EC 1.3.3.2) (LATHOSTEROL | | | | | | | |
| | | OXIDASE). Length = 299 | | | | | | | |
| 589 | 840991 | (AF032886) forkhead protein [Homo sapiens] | gi\|2895494 | 861 | 1559 | 81 | 81 | HE8FA09 | |
| | | >sp\|O43524\|O43524 FORKHEAD PROTEIIN. | | | | | | | |
| | | Length = 673 | | | | | | | |
| 590 | 840996 | ATP:citrate lyase [Homo sapiens] | gi\|603074 | 818 | 1906 | 99 | 99 | HE8MY23 | |
| | | >sp\|Q 13037\|Q13037 ATP:CITRATE LYASE. | | | | | | | |
| | | Length = 1101 | | | | | | | |
| 591 | 840997 | LIV-1 protein [Homo sapiens] | gi\|1256001 | 3 | 1193 | 75 | 75 | HE8DR57 | |
| | | >pir\|G02273\|G02273 LIV-1 protein-human | | | | | | | |
| | | >sp\|Q13433\|Q13433 ESTROGEN | | | | | | | |
| | | REGULATED LIV-1 PROTEIN. Length = 752 | | | | | | | |
| 592 | 840998 | | | 1 | 390 | | | HE2BN26 | |
| 593 | 840999 | | | 855 | 1013 | | | HE8DJ30 | |
| 594 | 841000 | | | 1 | 279 | | | HE6DC57 | |
| 595 | 841002 | | | 363 | 812 | | | HE8BT63 | |
| 596 | 841003 | | | 94 | 315 | | | HE2DX28 | |
| 597 | 841008 | Aop1_Human, MER5(Aop1_Mouse)-like protein | gnl\|PID\|d1008985 | 1 | 672 | 99 | 99 | HE8AU49 | |
| | | [Homo sapiens]>gi\|854126 humer [Homo | | | | | | | |
| | | sapiens] {SUB 227-256} Length = 256 | | | | | | | |
| 598 | 841013 | (AB011004) UDP-N-acetylglucosamine | gnl\|PID\|d1032151 | 265 | 1836 | 99 | 99 | HDTAU64 | |
| | | pyrophosphorylase [Homo sapiens] | | | | | | | |
| | | >sp\|Q16222\|Q16222 AGX-1 ANTIGEN | | | | | | | |
| | | (FRAGMENT). Length = 505 | | | | | | | |
| 599 | 841014 | fumarase precursor [Homo sapiens]>gi\|4097195 | gi\|1545996 | 178 | 1185 | 96 | 96 | HE2EB32 | |
| | | fumarase [Homo sapiens] | | | | | | | |
| | | >sp\|P07954\|FUMH_HUMAN FUMARATE | | | | | | | |
| | | HYDRATASE, MITOCHONDRIAL | | | | | | | |
| | | PRECURSOR (EC 4.2.1.2) (FUMARASE). | | | | | | | |
| | | >sp\|G4097195\|G4097195 FUMARASE (EC | | | | | | | |
| | | 4.2.1.2). Length = 510 | | | | | | | |
| 600 | 841015 | | | 48 | 425 | | | HE2DT31 | |
| 601 | 841018 | | | 1 | 150 | | | HE2EA79 | |
| 602 | 841019 | | | 94 | 228 | | | HDTGC76 | |
| 603 | 841024 | Ran [Canis familiaris]>gi\|190879 ras-like | gi\|924 | 34 | 750 | 100 | 100 | HE9CO25 | |
| | | protein [Homo sapiens]>gi\|2967848 (AF052578) | | | | | | | |
| | | androgen receptor associated protein 24 [Homo | | | | | | | |
| | | sapiens]>gi\|727167 Ran [Mus musculus] | | | | | | | |
| | | >bbs\|180269 GTP-binding protein [mice, | | | | | | | |
| | | C3H/HeJ spleens, LDS responder, Peptide, 2 | | | | | | | |
| 604 | 841025 | | | 75 | 401 | | | HDTDZ04 | |
| 605 | 841026 | | | 3 | 599 | | | HDTGP42 | |
| 606 | 841027 | | | 1 | 489 | | | HDRMB48 | |
| 607 | 841029 | Id-2H [Homo sapiens]>pir\|A40227\|A40227 | gnl\|PID\|d1003496 | 1 | 528 | 100 | 100 | HDTAG94 | |
| | | transcription repressor Id-2-human | | | | | | | |
| | | >sp\|Q02363\|ID2_HUMAN DNA-BINDING | | | | | | | |
| | | PROTEIN INHIBITOR ID-2. Length = 134 | | | | | | | |
| 608 | 841030 | | | 515 | 721 | | | HDTGK45 | |
| 609 | 841031 | | | 23 | 145 | | | HDSAL27 | |
| 610 | 841034 | G-rich sequence factor-1 [Homo sapiens] | gi\|517196 | 267 | 449 | 95 | 98 | HPQDH60 | |
| | | >gi\|517196 G-rich sequence factor-1 [Homo | | | | | | | |
| | | sapiens]>sp\|Q12849\|GRF1_HUMAN G-RICH | | | | | | | |
| | | SEQUENCE FACTOR-1 (GRSF-1). | | | | | | | |
| | | >pir\|S48081\|S48081 GRSF-1 protein-human | | | | | | | |
| | | (fragment) {SUB 94-424} Length = 424 | | | | | | | |
| 611 | 841036 | | | 1201 | 1542 | | | HDPTM31 | |
| 612 | 841039 | (AC002340) putative RNA helicase A, 5'partial | gi\|2880057 | 763 | 2112 | 60 | 76 | HDQFB71 | |
| | | [Arabidopsis thaliana]>sp\|O49345\|O49345 | | | | | | | |
| | | PUTATIVE RNA HELICASE A, 5'PARTIAL | | | | | | | |
| | | (FRAGMENT). Length = 1114 | | | | | | | |
| 613 | 841040 | (AF071202) ABC transporter MOAT-B [Homo | gi\|3335173 | 2 | 1339 | 92 | 92 | HDQDF77 | |
| | | sapiens]>sp\|G3335173\|G3335173 ABC | | | | | | | |
| | | TRANSPORTER MOAT-B. Length = 1325 | | | | | | | |
| 614 | 841048 | | | 1 | 1338 | | | HDPXU60 | |
| 615 | 841049 | (AC003682) ZNF134 [Homo sapiens] | gi\|2689444 | 3 | 347 | 97 | 97 | HDPXK77 | |
| | | >sp\|G2689444\|G2689444 ZNF134. Length = 427 | | | | | | | |
| 616 | 841050 | | | 705 | 947 | | | HDPUP64 | |
| 617 | 841052 | monoamine oxidase A [Homo sapiens] | gi\|187351 | 1 | 1194 | 95 | 95 | HDPRJ46 | |
| | | >gi\|187353 monoamine oxidase A [Homo | | | | | | | |
| | | sapiens]>gi\|187355 monoamine oxidase A | | | | | | | |
| | | [Homo sapiens]>pir\|A36175\|A36175 amine | | | | | | | |
| | | oxidase (flavin-containing) (EC 1.4.3.4) A- | | | | | | | |
| | | human >sp\|P21397\|AOFA_HUMAN AMINE | | | | | | | |
| | | OXIDASE [FLAVIN-CONTAINI | | | | | | | |
| 618 | 841054 | | | 60 | 1262 | | | HDPXL80 | |
| 619 | 841055 | | | 23 | 346 | | | HDPMK92 | |
| 620 | 841056 | | | 492 | 695 | | | HDPVB33 | |
| 621 | 841060 | | | 612 | 851 | | | HDPXB24 | |
| 622 | 841061 | quinone oxidoreductase [Homo sapiens] | gi\|190818 | 21 | 614 | 100 | 100 | HPTBQ60 | |
| | | >gi\|516534 quinone oxidoreductase2 [Homo | | | | | | | |
| | | sapiens]>pir\|A32667\|A32667 NAD(P)H | | | | | | | |
| | | dehydrogenase (quinone) (EC 1.6.99.2) 2- | | | | | | | |
| | | human Length = 231 | | | | | | | |
| 623 | 841062 | histone deacetylase HD1 [Homo sapiens] | gi\|1277084 | 67 | 1530 | 90 | 90 | HDPPA96 | |
| | | >sp\|Q13547\|HDA1_HUMAN HISTONE | | | | | | | |
| | | DEACETYLASE 1 (HD 1). Length = 482 | | | | | | | |
| 624 | 841063 | (AL009194)SWISS-PR0T:P38861; | gnl\|PID\|e1251068 | 2 | 592 | 69 | 82 | HDPJQ57 | |
| | | NONSENSE-MEDIATED MRNA DECAY | | | | | | | |
| | | PROTEIN 3.; SACCHAROMYCES | | | | | | | |
| | | CEREVISIAE | | | | | | | |
| 625 | 841067 | mannosyl-oligosaccharide 1,2-alpha- | pir\|B54408\|B54408 | 2 | 592 | 59 | 83 | HDPQE64 | |
| | | mannosidase (EC 3.2.1.113)-rabbit (fragment) | | | | | | | |
| | | >gi\|474282 mannosyl-oligosaccharide alpha-1,2- | | | | | | | |
| | | mannosidase [Oryctolagus cuniculus] {SUB 12- | | | | | | | |
| | | 480} Length = 480 | | | | | | | |
| 626 | 841074 | 14.3.3 protein [Homo sapiens]>gi\|32464 HS1 | gi\|23222 | 188 | 907 | 98 | 99 | HE8NS76 | |
| | | gene product [Homo sapiens] | | | | | | | |
| | | >pir\|S15076\|S15076 protein kinase regulator | | | | | | | |
| | | 14.3.3-human >sp\|P27348\|143T_HUMAN 14- | | | | | | | |
| | | 3-3 PROTEIN TAU (14-3-3 PROTEIN THETA) | | | | | | | |
| | | (14-3-3 PROTEIN T-CELL) (HS1 PROTEIN). | | | | | | | |
| | | >gi\|3387922 (AF070556 | | | | | | | |
| 627 | 841076 | | | 96 | 755 | | | HDPMG95 | |
| 628 | 841081 | (AE000715) ribosomal protein L20 [Aquifex | gi\|2983472 | 2 | 541 | 41 | 65 | HDPQC09 | |
| | | aeolicus]>pir\|C70382\|C70382 ribosomal protein | | | | | | | |
| | | L20-Aquifex aeolicus >sp\|O67086\|O67086 50S | | | | | | | |
| | | RIBOSOMAL PROTEIN L20. Length = 118 | | | | | | | |
| 629 | 841083 | | | 1 | 480 | | | HDPCX80 | |
| 630 | 841089 | | | 321 | 551 | | | HDPND16 | |
| 631 | 841093 | (AF035646) Rab10 [Mus musculus]gi\|3406428 | 479 | 1132 | 100 | 100 | HDPPI29 | | |
| | | >sp\|088386\|088386 RAB10. Length = 200 | | | | | | | |
| 632 | 841097 | (AF090867) guanosine monophosphate reductase | gi\|3907579 | 267 | 1061 | 78 | 90 | HDPFB78 | |
| | | [Rattus norvegicus]>sp\|G3907579\|G3907579 | | | | | | | |
| | | GUANOSINE MONOPHOSPHATE | | | | | | | |
| | | REDUCTASE. Length = 345 | | | | | | | |
| 633 | 841098 | GATA-binding protein [Homo sapiens] | gi\|182996 | 1 | 384 | 90 | 91 | HDABX64 | |
| | | >pir\|A40815\|A40815 transcription factor GATA- | | | | | | | |
| | | 2 (version 1)-human | | | | | | | |
| | | >sp\|P23769\|GAT2_HUMAN ENDOTHELIAL | | | | | | | |
| | | TRANSCRIPTION FACTOR GATA-2. Length = | | | | | | | |
| | | 480 | | | | | | | |
| 634 | 841101 | phosphatidyicholine transfer protein [Bos taurus] | gi\|710419 | 3 | 1004 | 35 | 55 | HDPBQ32 | |
| | | >pir\|A91092\|EPBO phosphatidyicholine transfer | | | | | | | |
| | | protein-bovine >sp\|P02720\|PPCT_BOVIN | | | | | | | |
| | | PHOSPHATIDYLCHOLINE TRANSFER | | | | | | | |
| | | PROTEIN (PC-TP). Length = 213 | | | | | | | |
| 635 | 841113 | 2-hydroxyhepta-2,4-diene-1,7-dioate isomerase | gi\|1500558 | 133 | 1137 | 50 | 74 | HDBAE85 | |
| | | (hpcE) [Methanococcus jannaschii] | | | | | | | |
| | | >pir\|F64506\|F64506 2-hydroxyhepta-2,4-diene- | | | | | | | |
| | | 1,7-dioate isomerase homolog-Methanococcus | | | | | | | |
| | | jannaschii >sp\|Q59050\|Q59050 | | | | | | | |
| | | HYPOTHETICAL PROTEIN MJ1656. Length = | | | | | | | |
| | | 237 | | | | | | | |
| 636 | 841115 | | | 58 | 396 | | | HDLAZ62 | |
| 637 | 841116 | | | 47 | 682 | | | HDPBJ61 | |
| 638 | 841117 | | | 1 | 1179 | | | HDFMB93 | |
| 639 | 841125 | | | 1 | 117 | | | HCYBI78 | |
| 640 | 841127 | | | 2 | 859 | | | HDABQ85 | |
| 641 | 841128 | collagenase stimulatory factor [Homo sapiens] | gi\|409357 | 64 | 891 | 100 | 100 | HDPFH18 | |
| | | >gi\|1209374 amino acid feature: intracellular | | | | | | | |
| | | domain, aa 707 .. 829; amino acid feature: | | | | | | | |
| | | transmembrane domain, aa 638 .. 706; amino | | | | | | | |
| | | acid feature: extracellular domain, aa 86 .. 637 | | | | | | | |
| | | [Homo sapiens]>gi\|34449 M6 | | | | | | | |
| 642 | 841132 | | | 1 | 1428 | | | FTDPFI70 | |
| 643 | 841133 | myosin-I, Myr 1c (alternatively spliced)-rat | pir\|B45439\|B45439 | 4 | 1710 | 89 | 91 | HCYBL17 | |
| | | Length = 1078 | | | | | | | |
| 644 | 841134 | gamma SNAP [Homo sapiens] Length = 312 | gi\|1685288 | 2 | 802 | 100 | 100 | HDAAC32 | |
| 645 | 841135 | homologous to mouse gene PC326:GenBank | gi\|458692 | 124 | 765 | 81 | 81 | HDABE30 | |
| | | Accession Number M95564 [Homo sapiens] | | | | | | | |
| | | >sp\|Q12839\|Q12839 (H326). Length = 597 | | | | | | | |
| 646 | 841136 | | | 514 | 735 | | | HCQDF95 | |
| 647 | 841138 | imogen 38 [Homo sapiens]>sp\|Q92665\|Q92665 | gnl\|PID\|e218584 | 3 | 1238 | 80 | 80 | HDABK25 | |
| | | IMOGEN 38. Length = 395 | | | | | | | |
| 648 | 841139 | | | 347 | 478 | | | HCQBH60 | |
| 649 | 841141 | | | 192 | 833 | | | HDPBQ85 | |
| 650 | 841142 | | | 452 | 1051 | | | HCQAM05 | |
| 651 | 841145 | | | 1022 | 1366 | | | HCNSQ35 | |
| 652 | 841146 | | | 864 | 1061 | | | HCMSW06 | |
| 653 | 841150 | (AF038957) translation initiation factor 4e | gi\|3329384 | 115 | 387 | 83 | 86 | HCQAG10 | |
| | | [Homo sapiens]>sp\|O75349\|O75349 | | | | | | | |
| | | TRANSLATION INITIATION FACTOR 4E. | | | | | | | |
| | | Length = 236 | | | | | | | |
| 654 | 841153 | argininosuccinate synthetase [Homo sapiens] | gi\|179057 | 1207 | 2532 | 96 | 96 | HCYBC10 | |
| | | >gi\|28872 argininosuccinate synthetase (aa 1- | | | | | | | |
| | | 412) [Homo sapiens]>pir\|A01195\|AJHURS | | | | | | | |
| | | argininosuccinate synthase (EC 6.3.4.5)-human | | | | | | | |
| | | >sp\|P00966\|ASSY_HUMAN | | | | | | | |
| | | ARGININOSUCCINATE SYNTHASE (EC | | | | | | | |
| | | 6.3.4.5) (CITRULLINE-ASPA | | | | | | | |
| 655 | 841154 | (AF084260) signalosome subunit 2 [Homo | gi\|3514097 | 1 | 1368 | 100 | 100 | HCMSB29 | |
| | | sapiens]>gi\|3639069 (AF087688) alien-like | | | | | | | |
| | | protein [Mus musculus]>sp\|O88950\|O58950 | | | | | | | |
| | | ALIEN-LIKE PROTEIN. | | | | | | | |
| | | >sp\|G3514097\|G3514097 SIGNALOSOME | | | | | | | |
| | | SUBUNIT 2. >gi\|3309166 (AF071312) COP9 | | | | | | | |
| | | complex subunit 2 [Mus musculus] {SUB 4 | | | | | | | |
| 656 | 841156 | carcinoma-associated antigen GA733-2 [Homo | gi\|182896 | 6 | 1130 | 86 | 86 | HCIAA60 | |
| | | sapiens]>gi\|182906 carcinoma-associated | | | | | | | |
| | | antigen GA733-2 [Homo sapiens] | | | | | | | |
| | | >pir\|B48149\|B48149 epithelial glycoprotein | | | | | | | |
| | | antigen GA733-2 precursor-human Length = | | | | | | | |
| | | 314 | | | | | | | |
| 657 | 841157 | collagen pro-alpha-1 type I chain [Mus | gi\|47067488 | 336 | 36 | 42 | | HCHCJ07 | |
| | | musculus]>pir\|S57243\|S21626 collagen alpha | | | | | | | |
| | | 1(I) chain precursor-mouse | | | | | | | |
| | | >sp\|P11087\|CA11_MOUSE PROCOLLAGEN | | | | | | | |
| | | ALPHA 1(I) CHAIN PRECURSOR. >gi\|192262 | | | | | | | |
| | | pro-alpha-1 type I collagen [Mus musculus] | | | | | | | |
| | | {SUB 518-1128} >gi\|192264 p | | | | | | | |
| 658 | 841159 | | | 510 | 818 | | | HCLCK84 | |
| 659 | 841164 | | | 2 | 463 | | | HCHAZ66 | |
| 660 | 841167 | | | 982 | 1305 | | | HCHOG20 | |
| 661 | 841170 | SRp30c [Homo sapiens]>gnl\|PID\|e1248292 | gi\|1049078 | 2 | 760 | 81 | 81 | HCHOE21 | |
| | | (AL021546) pre-mRNA splicing factor SRp30c | | | | | | | |
| | | [Homo sapiens]>gi\|4099429 splicing factor | | | | | | | |
| | | SRp30c [Homo sapiens]>pir\|S59075\|S59075 | | | | | | | |
| | | splicing factor SRp30c-human | | | | | | | |
| | | >sp\|G4099429\|G4099429 SPLICING FACTOR | | | | | | | |
| | | SRP30C. Length = 22 | | | | | | | |
| 662 | 841173 | spermidine synthase [Homo sapiens] | gi\|338394 | 2 | 931 | 97 | 97 | HCHBQ07 | |
| | | >pir\|A32610\|A32610 spermidine synthase (EC | | | | | | | |
| | | 2.5.1.16)-human Length = 302 | | | | | | | |
| 663 | 841176 | | | 561 | 683 | | | HCF0136 | |
| 664 | 841178 | thyroid receptor interactor [Homo sapiens] | gi\|703110 | 65 | 460 | 99 | 100 | HCGBQ34 | |
| | | Length = 152 | | | | | | | |
| 665 | 841180 | (AF029777) hGCN5 [Homo sapiens] | gi\|3220164 | 553 | 1530 | 97 | 97 | HCGLC82 | |
| | | >sp\|G3220164\|G3220164 HGCN5. >gi\|1491935 | | | | | | | |
| | | histone acetyltransferase [Homo sapiens]{SUB | | | | | | | |
| | | 362-837} >sp\|G1911495\|G1911495 | | | | | | | |
| | | HGCN5=TRANSCRIPTIONAL ADAPTOR. | | | | | | | |
| | | {SUB 411-837} Length = 837 | | | | | | | |
| 666 | 841181 | | | 2 | 283 | | | HCFMN22 | |
| 667 | 841182 | 70K protein (AA 1-614) [Homo sapiens] | gi\|36100 | 251 | 988 | 100 | 100 | HCFNJ56 | |
| | | >pir\|A25707\|A25707 U1 snRNP 70K protein- | | | | | | | |
| | | human >gi\|337447 small ribonucleoprotein 70 kd | | | | | | | |
| | | protein [Homo sapiens] {SUB 178-614} | | | | | | | |
| | | >gi\|602021 hU1-70K protein (302 AA) [Homo | | | | | | | |
| | | sapiens] {SUB 227-527} Length = 614 | | | | | | | |
| 668 | 841185 | | | 342 | 536 | | | HCFNF67 | |
| 669 | 841187 | | | 458 | 1096 | | | HCGAA74 | |
| 670 | 841188 | DNA repair endonuclease subunit [Homo | gi\|1524411 | 2 | 2749 | 92 | 92 | HCFMK76 | |
| | | sapiens] Length = 905 | | | | | | | |
| 671 | 841189 | | | 336 | 926 | | | HCFMC34 | |
| 672 | 841192 | methylmalonyl-CoA mutase [Homo sapiens] | gi\|187452 | 1 | 1428 | 99 | 99 | HCFMO54 | |
| | | >sp\|P22033\|MUTA_HUMAN | | | | | | | |
| | | METHYLMALONYL-COA MUTASE | | | | | | | |
| | | PRECURSOR (EC 5.4.99.2) (MCM). Length = | | | | | | | |
| | | 750 | | | | | | | |
| 673 | 841194 | (AF039405) arsenite-translocating ATPase [Mus | gi\|2745900 | 182 | 1138 | 95 | 95 | HCGAB52 | |
| | | musculus]>sp\|O54984\|O54984 ARSENITE- | | | | | | | |
| | | TRANSLOCATING ATPASE. Length = 350 | | | | | | | |
| 674 | 841195 | | | 3 | 623 | | | HCEWM29 | |
| 675 | 841198 | | | 2 | 913 | | | HCFBC32 | |
| 676 | 841200 | (AF015037) endooligopeptidase A related | gi\|2827886 | 35 | 703 | 75 | 81 | HCEER84 | |
| | | protein; EOPA related protein [Oryctolagus | | | | | | | |
| | | cuniculus]>sp\|O46480\|O46480 | | | | | | | |
| | | ENDOOLIGOPEPTIDASE A RELATED | | | | | | | |
| | | PROTEIN (FRAGMENT). Length = 667 | | | | | | | |
| 677 | 841201 | | | 158 | 571 | | | HCEBD63 | |
| 678 | 841202 | rhoB [Homo sapiens]>gi\|206656 rhoB [Rattus | gi\|36032 | 66 | 1229 | 100 | 100 | HCHOV21 | |
| | | norvegicus]>gnl\|PID\|e258480 RHOB [Mus | | | | | | | |
| | | musculus]>pir\|A01372\|TVHURH GTP-binding | | | | | | | |
| | | protein rhoB-human >pir\|A39727\|TVRTRH | | | | | | | |
| | | GTP-binding protein rhoB-rat | | | | | | | |
| | | >pir\|JC5075\|JC5075 GTP-binding protein rhoB- | | | | | | | |
| | | mouse >gi\|3373 | | | | | | | |
| 679 | 841209 | | | 1 | 552 | | | HCDMF27 | |
| 680 | 841210 | PTB-associated splicing factor [Homo sapiens] | gi\|38458 | 2 | 1405 | 93 | 93 | HCEMT64 | |
| | | >pir\|A46302\|A46302 PTB-associated splicing | | | | | | | |
| | | factor, long form-human >gi\|23712 myoblast | | | | | | | |
| | | antigen 24.1D5 [Homo sapiens] {SUB 312-707} | | | | | | | |
| | | >gi\|4063717 (AF110499) PTB-associated | | | | | | | |
| | | splicing factor [Mus musculus] {SUB 377 | | | | | | | |
| 681 | 841213 | G9a [Homo sapiens]>pir\|530385\|530385 G9a | gi\|287865 | 3 | 344 | 82 | 84 | HCEFE38 | |
| | | protein-human >sp\|Q14349\|Q14349 G9A | | | | | | | |
| | | PROTEIN CONTAINING ANKYRIN-LIKE | | | | | | | |
| | | REPEATS. Length = 1001 | | | | | | | |
| 682 | 841217 | | | 2 | 1198 | | | HCE1V79 | |
| 683 | 841219 | SMOOTH MUSCLE MYOSIN HEAVY CHAIN | sp\|D1037960\|D1037960 | 208 | 774 | 95 | 97 | HBZSI02 | |
| | | (FRAGMENT). Length = 1052 | | | | | | | |
| 684 | 841222 | | | 29 | 856 | | | HCDCI63 | |
| 685 | 841223 | | | 2088 | 2486 | | | HCEBW38 | |
| 686 | 841224 | RNA polymerase II elongation factor ELL2 | gi\|1946347 | 2 | 2032 | 95 | 95 | HCE2D15 | |
| | | [Homo sapiens]>sp\|O00472\|ELL2_HUMAN | | | | | | | |
| | | RNA POLYMERASE II ELONGATION | | | | | | | |
| | | FACTOR ELL2. Length = 640 | | | | | | | |
| 687 | 841226 | | | 2 | 373 | | | HCCMD50 | |
| 688 | 841227 | | | 1 | 831 | | | HBZAK55 | |
| 689 | 841228 | F25H9.7 [Caenorhabditis elegans] | gnl\|PID\|e1346003 | 3 | 407 | 46 | 62 | HCDEA07 | |
| | | >gnl\|PID\|e1346003 F25H9.7 [Caenorhabditis | | | | | | | |
| | | elegans]>sp\|P91989\|P91989 F25H9.7 | | | | | | | |
| | | PROTEIN. Length = 154 | | | | | | | |
| 690 | 841231 | | | 279 | 977 | | | HBXCC66 | |
| 691 | 841232 | MHC HLA-RD protein [Homo sapiens] | gi\|386949 | 3 | 461 | 94 | 95 | HCE1S91 | |
| | | >pir\|A33640\|A33640 class III histocompatibility | | | | | | | |
| | | antigen RD-human Length = 382 | | | | | | | |
| 692 | 841233 | (AF069984) nitrilase homolog 1 [Homo sapiens] | gi\|3242978 | 2 | 673 | 94 | 95 | HBUAF56 | |
| | | >gi\|3228666 (AF069987) nitrilase 1 [Homo | | | | | | | |
| | | sapiens]>sp\|O76091\|O76091 NITRILASE | | | | | | | |
| | | HOMOLOG 1. Length = 327 | | | | | | | |
| 693 | 841234 | (AJ005073) Alix [Mus musculus] | gnl\|PID\|e1318710 | 561 | 2564 | 89 | 91 | HBWCI70 | |
| | | >sp\|O88695\|O88695 ALIX. Length = 869 | | | | | | | |
| 694 | 841236 | | | 187 | 483 | | | HBXGB85 | |
| 695 | 841238 | | | 168 | 389 | | | HBXFF92 | |
| 696 | 841239 | | | 405 | 605 | | | HBMUU08 | |
| 697 | 841242 | | | 169 | 360 | | | HBNAT03 | |
| 698 | 841243 | | | 3 | 281 | | | HBMTQ45 | |
| 699 | 841248 | phorbolin 3 [Homo sapiens] | gi\|4097433 | 3 | 668 | 46 | 62 | HBUAC02 | |
| | | >sp\|G4097433\|G4097433 PHORBOLIN 3. | | | | | | | |
| | | Length = 235 | | | | | | | |
| 700 | 841250 | | | 2 | 1309 | | | HBJEC31 | |
| 701 | 841251 | | | 5 | 247 | | | HBJLL24 | |
| 702 | 841254 | | | 879 | 1136 | | | HBZSH07 | |
| 703 | 841263 | | | 1 | 354 | | | HBJDS57 | |
| 704 | 841266 | | | 182 | 337 | | | HBJFN11 | |
| 705 | 841269 | (AL021958) fadE9 [Mycobacterium tuberculosis] | gnl\|PID\|e1253290 | 93 | 1130 | 51 | 70 | HBDAC79 | |
| | | >sp\|O53815\|O53815 ACYL-COA | | | | | | | |
| | | DEHYDROGENASE. Length = 390 | | | | | | | |
| 706 | 841272 | p67 myc protein [Homo sapiens] | gnl\|PID\|d1001846 | 20 | 622 | 100 | 100 | HBJFJ36 | |
| | | >sp\|D1001846\|D1001846 P67 MYC PROTEIN | | | | | | | |
| | | (FRAGMENT). Length = 454 | | | | | | | |
| 707 | 841273 | | | 697 | 948 | | | HBFMD57 | |
| 708 | 841276 | | | 244 | 423 | | | HBNAE62 | |
| 709 | 841277 | NADH-UBIQUINONE OXIDOREDUCTASE | sp\|Q16795\|NUEM_H | 2 | 1171 | 94 | 94 | HBICG75 | |
| | | 39 KD SUBUNIT PRECURSOR (EC 1.6.5.3) | UMAN | | | | | | |
| | | (EC 1.6.99.3) (COMPLEX I-39KD) (CI-39KD). | | | | | | | |
| | | >gi\|189049 NADH dehydrogenase (ubiquinone) | | | | | | | |
| | | [Homo sapiens] {SUB 3-377} Length = 377 | | | | | | | |
| 710 | 841278 | gag polyprotein-human endogenous virus S71 | pir\|A46312\|A46312 | 119 | 415 | 44 | 56 | HATDB46 | |
| | | Length = 608 | | | | | | | |
| 711 | 841279 | | | 187 | 645 | | | HPIAF81 | |
| 712 | 841280 | (AF061513) candidate adaptor protein CED-6 | gi\|3253308 | 888 | 1823 | 50 | 69 | HBCAS37 | |
| | | [Caenorhabditis elegans]>sp\|O76337\|O76337 | | | | | | | |
| | | CANDIDATE ADAPTOR PROTEIN CED-6. | | | | | | | |
| | | Length = 492 | | | | | | | |
| 713 | 841282 | | | 219 | 368 | | | HATAM48 | |
| 714 | 841283 | | | 2530 | 2880 | | | HBAFS89 | |
| 715 | 841286 | (AC003096) putative protein phosphatase 2C | gi\|3132471 | 201 | 1319 | 57 | 80 | HAHCP59 | |
| | | [Arabidopsis thaliana]>sp\|O64583\|O64583 | | | | | | | |
| | | HYPOTHETICAL 26.4 KD PROTEIN. Length = | | | | | | | |
| | | 239 | | | | | | | |
| 716 | 841287 | | | 3 | 248 | | | | HARMV18 |
| 717 | 841288 | (AL021428) hypothetical protein Rv0068 gnl\|PID\|e1245998 | 3 | 821 | | | HARMM85 | | |
| | | [Mycobacterium tuberculosis] | | | | | | | |
| | | >sp\|O53613\|O53613 OXIDOREDUCTASE. | | | | | | | |
| | | Length = 303 | | | | | | | |
| 718 | 841291 | selenoprotein P [Homo sapiens] Length = 381 | gnl\|PID\|e1192260 | 293 | 1012 | 88 | 89 | HBMCL13 | |
| 719 | 841292 | SSR gamma subunit [Rattus norvegicus] | gi\|312702 | 2 | 664 | 98 | 98 | HARAI52 | |
| | | >pir\|533294\|533294 translocon-associated | | | | | | | |
| | | protein gamma chain-rat Length = 185 | | | | | | | |
| 720 | 841294 | microtubule associated protein [Homo sapiens] | gi\|414115 | 3 | 1265 | 99 | 99 | HAPOR25 | |
| | | >pir\|I37356\|I37356 epithelial microtubule- | | | | | | | |
| | | associated protein, 115K-human | | | | | | | |
| | | >sp\|Q14244\|Q14244 MICROTUBULE | | | | | | | |
| | | ASSOCIATED PROTEIN. Length = 749 | | | | | | | |
| 721 | 841296 | protein disulfide isomerase-related protein | gi\|181508 | 2 | 1405 | 96 | 96 | HASAS34 | |
| | | [Homo sapiens]>pir\|A23723\|A23723 protein | | | | | | | |
| | | disulfide-isomerase (EC 5.3.4.1) ERp72 | | | | | | | |
| | | precursor-human >sp\|P13667\|ER72_HUMAN | | | | | | | |
| | | PROTEIN DISULFIDE ISOMERASE- | | | | | | | |
| | | RELATED PROTEIN PRECURSOR (ERP72). | | | | | | | |
| | | Length = 645 | | | | | | | |
| 722 | 841298 | Gps1 [Homo sapiens]>pir\|G01646\|G01646 Gps1- | gi\|644879 | 3 | 1067 | 91 | 91 | HATAI49 | |
| | | human >sp\|Q13098\|GPS1_HUMAN G | | | | | | | |
| | | PROTEIN PATHWAY SUPPRESSOR 1 (GPS1 | | | | | | | |
| | | PROTEIN) (MFH PROTEIN). {SUB 30-500} | | | | | | | |
| | | Length = 500 | | | | | | | |
| 723 | 841301 | | | 10 | 231 | | | HAPNO69 | |
| 724 | 841303 | synexin [Homo sapiens] | gi\|338244 | 3 | 1457 | 100 | 100 | HAOMG39 | |
| | | >sp\|P20073\|ANX7_HUMAN ANNEXIN VII | | | | | | | |
| | | (SYNEXIN). Length = 466 | | | | | | | |
| 725 | 841304 | (AB000199) CCA2 protein [Rattus norvegicus] | dbj\|AB000199_1 | 3 | 707 | 89 | 95 | HAPOE40 | |
| | | >sp\|O35048\|O35048 CCA2 PROTEIN. Length = | | | | | | | |
| | | 338 | | | | | | | |
| 726 | 841305 | | | 399 | 1274 | | | HAMHD70 | |
| 727 | 841309 | similar to RNA binding protein; | gnl\|PID\|e1345859 | 137 | 1699 | 48 | 63 | HAPAJ60 | |
| | | >sp\|Q19706\|IF35_CAEEL PROBABLE | | | | | | | |
| | | EUKARYOTIC TRANSLATION INITIATION | | | | | | | |
| | | FACTOR 3 RNA-BINDTNG SUBUNIT (EIF-3 | | | | | | | |
| | | RNA-BINDING SUBUNIT) (EIF3 P33) | | | | | | | |
| | | (TRANSLATION INITIATION F | | | | | | | |
| 728 | 841314 | | | 3 | 920 | | | HAMGN09 | |
| 729 | 841316 | (AJ224819) tumor suppressor [Homo sapiens] | gnl\|PID\|e1292742 | 185 | 1420 | 93 | 93 | HAJCP55 | |
| | | >sp\|O60858\|O60858 TUMOR SUPPRESSOR. | | | | | | | |
| | | Length = 407 | | | | | | | |
| 730 | 841318 | replication control protein 1 [Homo sapiens] | gi\|1171204 | 170 | 436 | 100 | 100 | HAMFQ80 | |
| | | >pir\|G02329\|G02329 replication control protein 1- | | | | | | | |
| | | human >sp\|Q13471\|Q13471 REPLICATION | | | | | | | |
| | | CONTROL PROTEIN 1. Length = 861 | | | | | | | |
| 731 | 841321 | hnRNP A2 protein [Homo sapiens] | gi\|337449 | 3 | 656 | 100 | 100 | HBJMK69 | |
| | | >gnl\|PID\|d1006583 hnRNP A2 protein [Homo | | | | | | | |
| | | sapiens]>gi\|500638 hnRNP protein A2 [Homo | | | | | | | |
| | | sapiens] Length = 341 | | | | | | | |
| 732 | 841324 | chimeric IFNalpha/beta-receptor [Homo sapiens] | gnl\|PID\|e251628 | 31 | 1755 | 99 | 99 | HAMGF04 | |
| | | >gi\|306914 interferon-alpha receptor precursor | | | | | | | |
| | | [Homo sapiens]>pir\|A32694\|A32694 interferon | | | | | | | |
| | | alpha receptor precursor-human | | | | | | | |
| | | >sp\|P17181\|INR 1_HUMAN INTERFERON- | | | | | | | |
| | | ALPHA/BETA RECEPTOR ALPHA CHAIN | | | | | | | |
| | | PRECURSOR (IFN-ALP | | | | | | | |
| 733 | 841326 | Rch1 [Homo sapiens]>gi\|899539 hSRP1 alpha | gi\|791185 | 3 | 1715 | 97 | 97 | HAMFV20 | |
| | | [Homo sapiens]>pir\|A56516\|A56516 nuclear | | | | | | | |
| | | localization sequence receptor SRP1 alpha- | | | | | | | |
| | | human >sp\|P52292\|IMA2_HUMAN IMPORTIN | | | | | | | |
| | | ALPHA-2 SUBUNIT (KARYOPHERIN | | | | | | | |
| | | ALPHA-2 SUBUNIT) (SRP1-ALPHA) (RAG | | | | | | | |
| | | COHORT PROTEIN 1). Length | | | | | | | |
| 734 | 841328 | nuclear ribonucleoprotein [Homo sapiens] | gi\|32354 | 2 | 1126 | 89 | 89 | HAMGF52 | |
| | | >gi\|35772 polypirimidine tract binding protein | | | | | | | |
| | | [Homo sapiens]>pir\|S26294\|S26294 | | | | | | | |
| | | polypyrimidine tract-binding protein-human | | | | | | | |
| | | Length = 557 | | | | | | | |
| 735 | 841329 | dJ434P1.3 [Homo sapiens]>gi\|1592565 DEAD- | gnl\|PID\|e1249592 | 93 | 671 | 100 | 100 | HAJBV54 | |
| | | box protein p72 [Homo sapiens] | | | | | | | |
| | | >pir\|S72367\|S72367 ATP-dependent RNA | | | | | | | |
| | | helicase-human >sp\|Q92841 P72_HUMAN | | | | | | | |
| | | PROBABLE RNA-DEPENDENT HELICASE | | | | | | | |
| | | P79 (DEAD-BOX PROTEIN P72). Length = 650 | | | | | | | |
| 736 | 841330 | (AF002228) tbx3 [Homo sapiens] | gi\|3041821 | 3 | 1097 | 91 | 91 | HAJAZ71 | |
| | | >sp\|O15119\|O15119 TBX3 (FRAGMENT). | | | | | | | |
| | | Length = 468 | | | | | | | |
| 737 | 841333 | (AB010882) hSNF2H [Homo sapiens] | gnl\|PID\|d1026101 | 1 | 2004 | 92 | 92 | HAJBA64 | |
| | | >sp\|O60264\|O60264 HSNF2H. Length = 1052 | | | | | | | |
| 738 | 841334 | SDF2 [Mus musculus]>pir\|JC5105\|JC5105 | gnl\|PID\|d1009954 | 3 | 713 | 59 | 71 | HAJBE68 | |
| | | stromal cell-derived factor 2-mouse | | | | | | | |
| | | >sp\|P97307\|P97307 STROMAL CELL | | | | | | | |
| | | DERIVED FACTOR 2 (SDF2). Length = 211 | | | | | | | |
| 739 | 841335 | | | 443 | 946 | | | HAJAT72 | |
| 740 | 841336 | | | 1 | 1557 | | | HAJCD33 | |
| 741 | 841337 | | | 263 | 1375 | | | HAJAO95 | |
| 742 | 841339 | transcription factor SC1 [Homo sapiens] | gi\|833833 | 27 | 740 | 88 | 89 | HAJCB95 | |
| | | >sp\|Q13176\|Q13176 TRANSCRIPTION | | | | | | | |
| | | FACTOR SC1. Length = 359 | | | | | | | |
| 743 | 841340 | | | 820 | 1017 | | | HAJAD20 | |
| 744 | 841341 | | | 3 | 359 | | | HAJAL18 | |
| 745 | 841342 | | | 1145 | 1417 | | | HAJAI64 | |
| 746 | 841343 | cellular nucleic acid binding protein [Mus | gi\|854675 | 263 | 685 | 100 | 100 | HAMGG35 | |
| | | musculus]>pir\|I49259\|I49259 cellular nucleic | | | | | | | |
| | | acid binding protein-mouse Length = 178 | | | | | | | |
| 747 | 841347 | (AF038844) MKP-1 like protein tyrosine | gi\|4104681 | 161 | 409 | 100 | 100 | HAHSE21 | |
| | | phosphatase [Homo sapiens] | | | | | | | |
| | | >sp\|G4104681\|G4104681 MKP-1 LIKE | | | | | | | |
| | | PROTEIN TYROSINE PHOSPHATASE. | | | | | | | |
| | | Length = 198 | | | | | | | |
| 748 | 841352 | ribosomal protein L35 [Homo sapiens] | gi\|562074 | 3 | 461 | 100 | 100 | HBJJF14 | |
| | | >pir\|G01477\|G01477 ribosomal protein L35- | | | | | | | |
| | | human Length = 123 | | | | | | | |
| 749 | 841353 | | | 73 | 462 | | | HAICO69 | |
| 750 | 841354 | | | 115 | 630 | | | HAPNQ64 | |
| 751 | 841360 | | | 1 | 816 | | | HAMFM60 | |
| 752 | 841366 | FKBP65 binding protein [Mus musculus] | gi\|894162 | 222 | 1319 | 92 | 96 | HAMGA45 | |
| | | >pir\|I49669\|I49669 FKBP65 binding protein- | | | | | | | |
| | | mouse >sp\|Q61576\|Q61576 FK506 BINDING | | | | | | | |
| | | PROTEIN 6 (65 KDA) (FKBP65 BINDING | | | | | | | |
| | | PROTEIN). Length = 581 | | | | | | | |
| 753 | 841405 | cathepsin O [Homo sapiens]>gi\|562757 | gi\|606923 | 24 | 1106 | 100 | 100 | HOABW85 | |
| | | Cathepsin O [Homo sapiens]>bbs\|172248 | | | | | | | |
| | | cathepsin O2 [human, spleen, Peptide, 329 aa] | | | | | | | |
| | | [Homo sapiens]>pir\|JC2476\|JC2476 cathepsin K | | | | | | | |
| | | (EC 3.4.22.-) precursor-human | | | | | | | |
| 754 | 841526 | signal recognition particle receptor beta subunit | gi\|600886 | 3 | 848 | 86 | 88 | HABAD39 | |
| | | [Mus musculus]>pir\|A56487\|A56487 signal | | | | | | | |
| | | recognition particle receptor beta chain-mouse | | | | | | | |
| | | Length = 269 | | | | | | | |
| 755 | 841712 | | | 3 | 698 | | | HBJJT93 | |
| 756 | 841860 | | | 1984 | 2352 | | | HPIAP58 | |
| 757 | 842042 | DNA-binding protein [Homo sapiens] | gnl\|PID\|e219699 | 2 | 817 | 76 | 76 | HBMXV50 | |
| | | >pir\|S69501\|S69501 DNA-binding protein A | | | | | | | |
| | | variant-human >sp\|Q14121\|Q14121 DNA- | | | | | | | |
| | | BINDING PROTEIN. Length = 372 | | | | | | | |
| 758 | 842453 | mitochondrial ATPase inhibitor [Rattus | gi\|517226 | 13 | 276 | 76 | 88 | HBKDV52 | |
| | | [norvegicus]>gnl\|PID\|d1002924 ATPase inhibitor | | | | | | | |
| | | protein precursor [Rattus sp.]>pir\|JS0738\|JS0738 | | | | | | | |
| | | ATPase inhibitor protein precursor, | | | | | | | |
| | | mitochondrial-rat >sp\|Q03344\|IATP_RAT | | | | | | | |
| | | ATPASE INHIBITOR, MITOCHONDRIAL | | | | | | | |
| | | PRECURSOR. | | | | | | | |
| 759 | 842635 | | | 268 | 936 | | | HFIIH20 | |
| 760 | 842927 | | | 2 | 1630 | | | HCE3G66 | |
| 761 | 842988 | | | 940 | 1152 | | | HOSAB76 | |
| 762 | 843080 | | | 2050 | 2442 | | | HDPBA08 | |
| 763 | 843237 | | | 370 | 1359 | | | HETIJ27 | |
| 764 | 843381 | | | 520 | 777 | | | HSIGN74 | |
| 765 | 843718 | (AF010313) Pig8 [Homo sapiens] | gi\|2415302 | 212 | 262 | 100 | 100 | HMEGI84 | |
| | | >sp\|O14681\|O14681 PIG8. Length = 318 | | | | | | | |
| 766 | 843823 | | | 2 | 1414 | | | HHESF85 | |
| 767 | 844056 | (AF010187) FGF-1 intracellular binding protein | gi\|2738520 | 2 | 751 | 100 | 100 | HE8UZ38 | |
| | | [Homo sapiens]>gi\|2738522 (AF010188) FGF-1 | | | | | | | |
| | | intracellular binding protein [Cercopithecus | | | | | | | |
| | | aethiops]>gi\|2738520 (AF010187) FGF-1 | | | | | | | |
| | | intracellular binding protein [Homo sapiens] | | | | | | | |
| | | >gi\|2738522 (AF010188) FGF-1 intrac | | | | | | | |
| 768 | 844325 | (AF059569) actin binding protein MAYVEN | gi\|3789797 | 46 | 1056 | 37 | 61 | HPRSB90 | |
| | | [Homo sapiens]>sp\|G3789797\|G3789797 | | | | | | | |
| | | ACTIN BINDING PROTEIN MAYVEN. Length = | | | | | | | |
| | | 593 | | | | | | | |
| 769 | 844344 | heparin-binding fibroblast growth factor receptor | gi\|310149 | 1 | 303 | 40 | 60 | HBJNC37 | |
| | | 2 [Rattus norvegicus]>sp\|Q63241\|Q63241 | | | | | | | |
| | | HEPARIN-BINDING FIBROBLAST GROWTH | | | | | | | |
| | | FACTOR RECEPTOR 2 (FRAGMENT). {SUB | | | | | | | |
| | | 1-330} Length = 331 | | | | | | | |
| 770 | 844368 | 15 KDA SELENOPROTEIN. Length = 162 | sp\|O60613\|O60613 | 3 | 374 | 91 | 91 | HAGHY70 | |
| 771 | 844408 | (AF001437) dihydrolipoamide dehydrogenase- | gi\|2316040 | 1358 | 1651 | 100 | 100 | HTNAD87 | |
| | | binding protein [Homo sapiens] Length = 501 | | | | | | | |
| 772 | 844508 | | | 1 | 300 | | | HADGG65 | |
| 773 | 844867 | | | 174 | 371 | | | HMVBJ82 | |
| 774 | 845000 | | | 1 | 321 | | | HE9DB89 | |
| 775 | 845281 | pre-pro polypeptide (AA-25 to 451) [Homo | gi\|29667 | 3 | 1475 | 100 | 100 | HEGAE94 | |
| | | sapiens]>pir\|S09489\|S09489 carboxypeptidase H | | | | | | | |
| | | (EC 3.4.17.10) precursor-human | | | | | | | |
| | | >sp\|P16870\|CBPH_HUMAN | | | | | | | |
| | | CARBOXYPEPTIDASE H PRECURSOR (EC | | | | | | | |
| | | 3.4.17.10) (CPH) (CARBOXYPEPTIDASE E) | | | | | | | |
| | | (CPE) (ENKEPHALIN CONVERTASE) | | | | | | | |
| | | (PROHORMON | | | | | | | |
| 776 | 845288 | (AF023268) propin1 [Homo sapiens] Length = | gi\|2564915 | 571 | 1107 | 75 | 76 | HTLDM37 | |
| | | 347 | | | | | | | |
| 777 | 845750 | selenium-binding protein [Homo sapiens] | gi\|1374792 | 3 | 1499 | 95 | 96 | HE9DH28 | |
| | | >pir\|G01872\|G01872 selenium-binding protein- | | | | | | | |
| | | human >sp\|Q13228\|Q13228 SELENIUM- | | | | | | | |
| | | BINDING PROTEIN. Length = 472 | | | | | | | |
| 778 | 845809 | SNAP23A protein [Homo sapiens] | gnl\|PID\|e290695 | 134 | 772 | 100 | 100 | HRGSE41 | |
| | | >gnl\|PID\|e1331767 (AJ011915) synaptosome | | | | | | | |
| | | associated protein of 23 kilodaltons, isoform A | | | | | | | |
| | | [Homo sapiens]>pir\|JC5296\|JC5296 vesicle- | | | | | | | |
| | | membrane fusion protein SNAP-23A-human | | | | | | | |
| | | >sp\|000161\|000161 VESICLE-MEMBRANE | | | | | | | |
| | | FUSION PROTEIN SN | | | | | | | |
| 779 | 846077 | | | 182 | 487 | | | HCNCN11 | |
| 780 | HPFCH77R | | | 21 | 80 | | | HPFCH77 | |
| 781 | HPRTI05R | | | 2 | 151 | | | HPRTI05 | |
| 782 | HMSKI93R | | | 25 | 192 | | | HMSKI93 | |
| 783 | HKAAC88R | (AB003103) 26S proteasome subunit p55 [Homo | gnl\|PID\|d1020530 | 1 | 333 | 85 | 88 | HKAAC88 | |
| | | sapiens]>sp\|O00232\|O00232 PROTEASOME | | | | | | | |
| | | SUBUNIT P55. Length = 456 | | | | | | | |
| 784 | HPDED94R | (AF001212) 26S proteasome subunit 9 [Homo | gi\|2150046 | 1 | 225 | 98 | 98 | HPDED94 | |
| | | sapiens]>sp\|O00495\|O00495 26S | | | | | | | |
| | | PROTEASOME SUBUNIT 9. Length = 422 | | | | | | | |
| 785 | HDTGH11R | (AF009674) axin [Homo sapiens] | gi\|2252820 | 1 | 189 | 96 | 96 | HDTGH11 | |
| | | >sp\|O15169\|015169 AXIN (FRAGMENT). | | | | | | | |
| | | Length = 900 | | | | | | | |
| 786 | HTEJR60R | (AF022184) EZF [Homo sapiens] | gi\|2897954 | 2 | 511 | 77 | 77 | HTEJR60 | |
| | | >sp\|O43474\|EZF_HUMAN EPITHELIAL | | | | | | | |
| | | ZINC-FINGER PROTEIN EZF. Length = 470 | | | | | | | |
| 787 | HAGGY86R | (AF029786) GBAS [Homo sapiens] | gi\|3403167 | 2 | 295 | 97 | 98 | HAGGY86 | |
| | | \|sp\|O75323\|O75323 GBAS. Length = 286 | | | | | | | |
| 788 | HPIAU47R | (AF031647) JAB 1-containing signalosome | gi\|2688989 | 3 | 377 | 89 | 91 | HPIAU47 | |
| | | subunit 3 [Homo sapiens]>sp\|O43191\|O43191 | | | | | | | |
| | | SIGNALOSOME SUBUNIT 3. Length = 403 | | | | | | | |
| 789 | HCGAD89R | (AF074935) beta-tubulin [Cryptosporidium | gi\|3328335 | 226 | 390 | 86 | 89 | HCGAD89 | |
| | | parvum]>gi\|3328337 (AF074936) beta-tubulin | | | | | | | |
| | | [Cryptosporidium parvum]>sp\|O77467\|O77467 | | | | | | | |
| | | BETA-TUBULIN (FRAGMENT). Length = 57 | | | | | | | |
| 790 | HAPOD39R | (AF089866) keratin 19 [Rattus norvegicus] | gi\|3766220 | 3 | 386 | 88 | 93 | HAPOD39 | |
| | | >sp\|G3766220\|G3766220 KERATIN 19 | | | | | | | |
| | | (FRAGMENT). Length = 123 | | | | | | | |
| 791 | HOGAA68R | 5'half of the product is homologues to Bacillus | gi128384 1 468 95 | 97 | HOGAA68 | | | | |
| | | subtiis SAICAR synthetase, 3'half corresponds | | | | | | | |
| | | to the catalytic subunit of AIR carboxylase | | | | | | | |
| | | [Homo sapiens]>pir\|S14147\|S14147 | | | | | | | |
| | | multifunctional purine biosynthesis protein- | | | | | | | |
| | | human Length = 425 | | | | | | | |
| 792 | HCLBO46R | Actin [Drosophila melanogaster] | gi\|7550 | 1 | 303 | 94 | 95 | HCLBO46 | |
| | | >pir\|S14851\|S14851 actin-fruit fly (Drosophila | | | | | | | |
| | | melanogaster) >sp\|Q24228\|Q24228 ACTIN. | | | | | | | |
| | | Length = 100 | | | | | | | |
| 793 | HDRAA14R | ADP,ATP carrier protein T2-human | pir\|S03894\|S03894 | 2 | 304 | 80 | 92 | HDRAA14 | |
| | | >sp\|P12236\|ADT3_HUMAN ADP,ATP | | | | | | | |
| | | CARRIER PROTEIN, LIVER ISOFORM T2 | | | | | | | |
| | | (ADP/ATP TRANSLOCASE 3) (ADENINE | | | | | | | |
| | | NUCLEOTIDE TRANSLOCATOR 3) (ANT 3). | | | | | | | |
| | | Length = 298 | | | | | | | |
| 794 | HSLCA48R | alpha-1 (III) collagen [Homo sapiens] Length = | gi\|930045 | 2 | 457 | 70 | 75 | HSLCA48 | |
| | | 1078 | | | | | | | |
| 795 | HMEAC81R | alpha-subunit of G-protein, type G-alpha-i-1 | gi\|64708 | 99 | 176 | 92 | 92 | HMEAC81 | |
| | | [Xenopus laevis]>pir\|S1104S\|RGXLI1 GTP- | | | | | | | |
| | | binding regulatory protein Gi alpha-1 chain | | | | | | | |
| | | (adenylate cyclase-inhibiting)-African clawed | | | | | | | |
| | | frog >sp\|P27044\|GBI1_XENLA GUANINE | | | | | | | |
| | | NUCLEOTIDE-BINDING PROTEIN G(I), | | | | | | | |
| | | ALPHA-1 SU | | | | | | | |
| 796 | HMQDF20R | beta-1,2-N-acetylglucosaminyltransferase II | gi\|902745 | 3 | 287 | 85 | 85 | HMQDF20 | |
| | | [Homo sapiens]>pir\|566256\|566256 alpha-1,6- | | | | | | | |
| | | mannosyl-glycoprotein beta-1,2-N- | | | | | | | |
| | | acetylglucosaminyltransferase (EC 2.4.1.143)- | | | | | | | |
| | | human >sp\|Q10469\|GNT2_HUMAN ALPHA- | | | | | | | |
| | | 1,6-MANNOSYL-GLYCOPROTEIN BETA- | | | | | | | |
| | | 1,2-N-ACETYLGLUCOSAM | | | | | | | |
| 797 | HCHOH06R | | | 12 | 242 | | | HCHOH06 | |
| 798 | HDQMC20R | | | 3 | 167 | | | HDQMC20 | |
| 799 | HMKCW11R | | | 2 | 112 | | | HMKCW11 | |
| 800 | HLDRN91R | C4b-binding protein alpha chain [Homo sapiens] | gi\|190500 | 2 | 331 | 99 | 100 | HLDRN91 | |
| | | >gi\|190502 C4b-binding protein alpha chain | | | | | | | |
| | | [Homo sapiens]>pir\|A33568\|NBHUC4 C4b- | | | | | | | |
| | | binding protein alpha chain precursor-human | | | | | | | |
| | | >sp\|P04003\|C4BP_HUMAN C4B-BINDING | | | | | | | |
| | | PROTEIN ALPHA CHAIN PRECURSOR | | | | | | | |
| | | (PROLINE-RICH PRO | | | | | | | |
| 801 | HCHBR17R | cathepsin D [Homo sapiens]>gi\|29678 precursor | gi\|179948 | 3 | 149 | 92 | 92 | HCHBR17 | |
| | | polypeptide (AA-20 to 392) [Homo sapiens] | | | | | | | |
| | | >gi\|181180 preprocathepsin D [Homo sapiens] | | | | | | | |
| | | >pir\|A25771\|KHHUD cathepsin D (EC 3.4.23.5) | | | | | | | |
| | | precursor-human >sp\|P07339\|CATD_HUMAN | | | | | | | |
| | | CATHEPSIN D PRECURSOR (EC 3.4.23.5). | | | | | | | |
| 802 | HMKCH15R | Cbf5p homolog [Homo sapiens]Length = 514 | gi\|2737894 | 131 | 400 | 81 | 81 | HMKCH15 | |
| 803 | HE6GO78R | clathrin light-chain A [Homo sapiens]Length = | gi\|307118 | 155 | 502 | 80 | 83 | HE6GO78 | |
| | | 218 | | | | | | | |
| 804 | HSLFI56R | complement component C3 [Homo sapiens] | gi\|179665 | 48 | 422 | 80 | 82 | HSLFI56 | |
| | | >pir\|A94065\|C3HU complement C3 precursor- | | | | | | | |
| | | human >sp\|P01024\|CO3_HUMAN | | | | | | | |
| | | COMPLEMENT C3 PRECURSOR | | | | | | | |
| | | [CONTAINS: C3A ANAPHYLATOXIN]. | | | | | | | |
| | | >gi\|181130 complement component C3 [Homo | | | | | | | |
| | | sapiens] {SUB 1-24} Length = 1663 | | | | | | | |
| 805 | HSYBY17R | cyclin G [Homo sapiens]>gi\|1236233 cyclin G1 | gnl\|PID\|d1012016 | 79 | 300 | 100 | 100 | HSYBY17 | |
| | | [Homo sapiens]>gi\|1236913 cyclin G1 [Homo | | | | | | | |
| | | sapiens]>pir\|G02401\|G02401 cyclin G1-human | | | | | | | |
| | | >sp\|P51959\|CG2G_HUMAN G2/MITOTIC- | | | | | | | |
| | | SPECIFIC CYCLIN G1. >gnl\|PID\|d1013694 | | | | | | | |
| | | cyclin G [Homo sapiens]{SUB 1-279} | | | | | | | |
| | | >gi\|1486361 c | | | | | | | |
| 806 | HPJCS07R | cytochrome oxidase I [Apteryx australis] | gi\|2198683 | 113 | 226 | 83 | 92 | HPJCS07 | |
| | | >sp\|O03515\|COX1_APTAU CYTOCHROME C | | | | | | | |
| | | OXIDASE POLYPEPTIDE I (EC 1.9.3.1) | | | | | | | |
| | | (FRAGMENT). Length = 337 | | | | | | | |
| 807 | HFADV82R | cytochrome oxidase III [Homo sapiens] | gi\|13010 | 1 | 105 | 81 | 83 | HFADV82 | |
| | | >pir\|A00482\|OTHU3 cytochrome-c oxidase (EC | | | | | | | |
| | | 1.9.3.1) chain III-human mitochondrion (SGC1) | | | | | | | |
| | | >sp\|P00414\|COX3_HUMAN CYTOCHROME C | | | | | | | |
| | | OXIDASE POLYPEPTIDE III (EC 1.9.3.1). | | | | | | | |
| | | >gi\|2245564 (AF004341) cytochrome c oxidase | | | | | | | |
| | | subunit I | | | | | | | |
| 808 | HFKFH08R | DNA polymerase delta small subunit [Homo | gi\|1008458 | 2 | 550 | 97 | 98 | HFKFH08 | |
| | | sapiens]>pir\|I38950\|I38950 DNA-directed DNA | | | | | | | |
| | | polymerase (EC 2.7.7.7) delta regulatory chain- | | | | | | | |
| | | human >sp\|P49005\|DPD_HUMAN DNA | | | | | | | |
| | | POLYMERASE DELTA SMALL SUBUNIT | | | | | | | |
| | | (EC 2.7.7.7). Length = 469 | | | | | | | |
| 809 | HMCDK47R | electron transport flavoprotein [Homo sapiens] | gi\|182251 | 3 | 320 | 100 | 100 | HMCDK47 | |
| | | >pir\|A31998\|A31998 electron transfer | | | | | | | |
| | | flavoprotein alpha chain precursor-human | | | | | | | |
| | | >sp\|P13804\|ETFA_HUMAN ELECTRON | | | | | | | |
| | | TRANSFER FLAVOPROTEIN ALPHA- | | | | | | | |
| | | SUBUNIT PRECURSOR (ALPHA-ETF). | | | | | | | |
| | | >gnl\|PID\|e1331769 (AJ224002) electron | | | | | | | |
| 810 | HPIBI27R | elongation factor 2 [Homo sapiens]>gi\|31108 | gi\|31106 | 23 | 319 | 98 | 98 | HPIBI27 | |
| | | human elongation factor 2 [Homo sapiens] | | | | | | | |
| | | >pir\|S18294\|EFHU2 translation elongation factor | | | | | | | |
| | | eEF-2-human >sp\|P13639\|EF2_HUMAN | | | | | | | |
| | | ELONGATION FACTOR 2 (EF-2). >gi\|181969 | | | | | | | |
| | | elongation factor 2 [Homo sapiens]{SUB 501- | | | | | | | |
| | | 858 | | | | | | | |
| 811 | HSKJG37R | elongation factor 2 [Homo sapiens]>gi\|31108 | gi\|31106 | 1 | 372 | 100 | 100 | HSKJG37 | |
| | | human elongation factor 2 [Homo sapiens] | | | | | | | |
| | | >pir\|S18294\|EFHU2 translation elongation factor | | | | | | | |
| | | eEF-2-human >sp\|P13639\|EF2_HUMAN | | | | | | | |
| | | ELONGATION FACTOR 2 (EF-2). >gi\|181969 | | | | | | | |
| | | elongation factor 2 [Homo sapiens]{SUB 501- | | | | | | | |
| | | 858 | | | | | | | |
| 812 | H2LAZ24R | elongation factor-1-beta [Homo sapiens] | gi\|31100 | 23 | 562 | 100 | 100 | H2LAZ24 | |
| | | >gi\|31135 elongation factor 1-beta [Homo | | | | | | | |
| | | sapiens]>pir\|S25432\|S25432 translation | | | | | | | |
| | | elongation factor eEF-1 beta chain-human | | | | | | | |
| | | >sp\|P24534\|EF1B_HUMAN ELONGATION | | | | | | | |
| | | FACTOR 1-BETA (EF-1-BETA). {SUB 2-225} | | | | | | | |
| | | Length = 225 | | | | | | | |
| 813 | H2LAC50R | enhancer protein [Homo sapiens] | gi\|440306 | 38 | 415 | 100 | 100 | H2LAC50 | |
| | | >pir\|154533\|154533 enhancer protein-human | | | | | | | |
| | | Length = 199 | | | | | | | |
| 814 | HPEAE15R | GLANDULAR KALLIKREIN-1. Length = 223 | sp\|Q15946\|Q15946 | 51 | 236 | 80 | 80 | HPEAE15 | |
| 815 | HPIAA24R | GTP-binding protein Ran/TC4-mouse | pir\|JH0654\|JH0654 | 382 | 507 | 91 | 91 | HPIAA24 | |
| | | (fragment) Length = 70 | | | | | | | |
| 816 | H2LAS11R | guanylate cyclase (EC 4.6.1.2)-bovine | pir\|S48119\|S48119 | 28 | 549 | 100 | 100 | H2LAS11 | |
| | | (fragment) >gi\|407777 guanylate cyclase [Bos | | | | | | | |
| | | taurus] {SUB 2-498} Length = 498 | | | | | | | |
| 817 | HHERW66R | HMG1 protein (AA 1-215) [Bos taurus] | gi\|417 | 3 | 386 | 83 | 83 | HHERW66 | |
| | | >pir\|S01947\|S01947 nonhistone chromosomal | | | | | | | |
| | | protein HMG-1-bovine | | | | | | | |
| | | >sp\|P10103\|HMG1_BOVIN HIGH MOBILITY | | | | | | | |
| | | GROUP PROTEIN HMG1 (HMG-1). {SUB 2- | | | | | | | |
| | | 215} Length = 215 | | | | | | | |
| 818 | HADMC73R | hMn-superoxiddismutase [unidentified] | gi\|491290 | 2 | 94 | 96 | 100 | HADMC73 | |
| | | >gi\|491292 hMN-superoxiddismutase | | | | | | | |
| | | [unidentified]>gnl\|PID\|e93456 Mn- | | | | | | | |
| | | superoxiddismutase [Homo sapiens] {SUB 23- | | | | | | | |
| | | 199} Length = 199 | | | | | | | |
| 819 | H6EEU22R | hormone receptor hERR1 (AA 1-521) [Homo | gi\|36609 | 34 | 225 | 100 | 100 | H6EEU22 | |
| | | sapiens]>pir\|A29345\|A29345 steroid hormone | | | | | | | |
| | | receptor ERR1 precursor-human | | | | | | | |
| | | >sp\|P11474\|ERR1_HUMAN STEROID | | | | | | | |
| | | HORMONE RECEPTOR ERR1 (ESTROGEN- | | | | | | | |
| | | RELATED RECEPTOR, ALPHA) (ESTROGEN | | | | | | | |
| | | RECEPTOR-LIKE 1). Length = 521 | | | | | | | |
| 820 | HDTDX66R | HP1Hs-gamma [Homo sapiens] | gi\|1773227 | 132 | 449 | 82 | 84 | HDTDX66 | |
| | | >sp\|Q13185\|HP1G_HUMAN | | | | | | | |
| | | HETEROCHROMATIN PROTEIN 1 | | | | | | | |
| | | HOMOLOG GAMMA (HP1 GAMMA) | | | | | | | |
| | | (MODIFIER 2 PROTEIN). | | | | | | | |
| | | >sp\|G1773227\|G1773227 HP1HS-GAMMA. | | | | | | | |
| | | Length = 173 | | | | | | | |
| 821 | HLPBB39R | human metallothionein-Ie [Homo sapiens] | gi\|386865 | 40 | 246 | 100 | 100 | HLPBB39 | |
| | | >pir\|A22634\|SMHU1E metallothionein 1E- | | | | | | | |
| | | human >sp\|P04732\|MT1E_HUMAN | | | | | | | |
| | | METALLOTHIONEIN-IE (MT-1E). | | | | | | | |
| | | >bbs\|144157 metallothionein MT-1e isoform, | | | | | | | |
| | | metallothionein-1e [human, monocytes, Peptide | | | | | | | |
| | | Partial, 31 aa] [Homo sapiens] | | | | | | | |
| 822 | HOELG04R | hypothetical 18K protein (rRNA)-goldfish | pir\|JCI348\|JC1348 | 293 | 415 | 65 | 68 | HOELG04 | |
| | | mitochondrion (SGC1) Length = 166 | | | | | | | |
| 823 | HKABU38R | initation factor 4B [Homo sapiens]gi\|288100 | 2 | 463 | 92 | 92 | | HKABU38 | |
| | | >pir\|S12566\|S12566 translation initiation factor | | | | | | | |
| | | eIF-4B-human >sp\|P23588\|IF4B_HUMAN | | | | | | | |
| | | EUKARYOTIC TRANSLATION INITIATION | | | | | | | |
| | | FACTOR 4B (EIF-4B). Length = 611 | | | | | | | |
| 824 | HBGOI32R | keratin 18 [Homo sapiens]>gi\|307081 keratin 18 | gi\|386844 | 1 | 240 | 66 | 67 | HBGOI32 | |
| | | precursor [Homo sapiens]>gi\|34037 cytokeratin | | | | | | | |
| | | 18 [Homo sapiens]>pir\|S05481\|S05481 keratin | | | | | | | |
| | | 18, type I, cyto skeletal-human | | | | | | | |
| | | >sp\|P05783\|K1CR_HUMAN KERATIN, TYPE I | | | | | | | |
| | | CYTOSKELETAL 18 (CYTOKERATIN 18) | | | | | | | |
| | | (K18) (CK 1 | | | | | | | |
| 825 | HATAI03R | KIAA0106 [Homo sapiens] | gnl\|PID\|d1004007 | 3 | 194 | 90 | 93 | HATAI03 | |
| | | >sp\|P30041\|AOP2_HUMAN ANTIOXIDANT | | | | | | | |
| | | PROTEIN 2 (EC 1.11.1.7) (24 KD PROTEIN) | | | | | | | |
| | | (LIVER 2D PAGE SPOT 40) (RED BLOOD | | | | | | | |
| | | CELLS PAGE SPOT 12). {SUB 2-224} Length = | | | | | | | |
| | | 224 | | | | | | | |
| 826 | HCEDE25R | KIAA0106 [Homo sapiens] | gnl\|PID\|d1004007 | 2 | 283 | 100 | 100 | HCEDE25 | |
| | | >sp\|P30041\|AOP2_HUMAN ANTIOXIDANT | | | | | | | |
| | | PROTEIN 2 (EC 1.11.1.7) (24 KD PROTEIN) | | | | | | | |
| | | (LIVER 2D PAGE SPOT 40) (RED BLOOD | | | | | | | |
| | | CELLS PAGE SPOT 12). {SUB 2-224} Length = | | | | | | | |
| | | 224 | | | | | | | |
| 827 | HKDBF62R | metallothionein-IG [Homo sapiens] | gi\|188713 | 170 | 322 | 95 | 95 | HKDBF62 | |
| | | >pir\|A29236\|SMHU1G metallothionein 1G- | | | | | | | |
| | | human >sp\|P13640\|MT1G_HUMAN | | | | | | | |
| | | METALLOTHIONEIN-IG (MT-1G). | | | | | | | |
| | | >bbs\|144160 metallothionein MT-1g isoform, | | | | | | | |
| | | metallothionein-1g [human, monocytes, Peptide | | | | | | | |
| | | Partial, 31 aa] [Homo sapiens]{SUB | | | | | | | |
| 828 | HNTSX94R | mitochondrial matrix protein [Homo sapiens] | gi\|190127 | 3 | 431 | 97 | 100 | HNTSX94 | |
| | | >pir\|A32800\|A32800 chaperonin GroEL | | | | | | | |
| | | precursor-human >sp\|P10809\|P60_HUMAN | | | | | | | |
| | | MITOCHONDRIAL MATRIX PROTEIN P1 | | | | | | | |
| | | PRECURSOR (P60 LYMPHOCYTE PROTEIN) | | | | | | | |
| | | (60 KD CHAPERONIN) (HEAT SHOCK | | | | | | | |
| | | PROTEIN 60) (HSP-60) (PROTEIN CPN60) ( | | | | | | | |
| 829 | HRGBR08R | mitochondrial matrix protein [Homo sapiens] | gi\|190127 | 1 | 504 | 94 | 94 | HRGBR08 | |
| | | >pir\|A32800\|A32800 chaperonin GroEL | | | | | | | |
| | | precursor-human >sp\|P10809\|P60_HUMAN | | | | | | | |
| | | MITOCHONDRIAL MATRIX PROTEIN P1 | | | | | | | |
| | | PRECURSOR (P60 LYMPHOCYTE PROTEIN) | | | | | | | |
| | | (60 KD CHAPERONIN) (HEAT SHOCK | | | | | | | |
| | | PROTEIN 60) (HSP-60) (PROTEIN CPN60) ( | | | | | | | |
| 830 | H2LAO77R | MSS1 protein [Homo sapiens] | gnl\|PID\|d1002345 | 137 | 580 | 91 | 91 | H2LAO77 | |
| | | >pir\|S24353\|S24353 proteasome 26S subunit | | | | | | | |
| | | MSS1-human >sp\|G385267\|G385267 26S | | | | | | | |
| | | PROTEASE SUBUNIT 7, | | | | | | | |
| | | MSS1=MODULATOR OF HIV TAT- | | | | | | | |
| | | MEDIATED TRANSACTIVATION. {SUB 2- | | | | | | | |
| | | 231 Length = 433 | | | | | | | |
| 831 | HNTRW15R | NAD+ ADP-ribosyltransferase [Homo sapiens] | gi\|178190 | 163 | 297 | 90 | 96 | HNTRW15 | |
| | | >pir\|A29725\|A29725 NAD+ ADP- | | | | | | | |
| | | ribosyltransferase (EC 2.4.2.30), nuclear-human | | | | | | | |
| | | >sp\|P09874\|PPOL_HUMAN POLY [ADP- | | | | | | | |
| | | RIBOSE]POLYMERASE (EC 2.4.2.30) (PARP) | | | | | | | |
| | | (ADPRT) (NAD(+) ADP- | | | | | | | |
| | | RIBOSYLTRANSFERASE) (POLY[ADP- | | | | | | | |
| | | RIBOSE] SYN | | | | | | | |
| 832 | HORBH08R | NADH dehydrogenase (ubiquinone) (EC 1.6.5.3) | pir\|A44362\|A44362 | 186 | 428 | 83 | 87 | HORBH08 | |
| | | 51K chain precursor-human (fragment) | | | | | | | |
| | | >sp\|P4982\|INUBM_HUMAN NADH- | | | | | | | |
| | | UBIQUINONE OXIDOREDUCTASE 51 KD | | | | | | | |
| | | SUBUNIT PRECURSOR (EC 1.6.5.3) (EC | | | | | | | |
| | | 1.6.99.3) (COMPLEX I-51 KD) (CI-51 KD) | | | | | | | |
| | | (FRAGMENT). >bbs\|142159 NADH:ubiquinone | | | | | | | |
| 833 | HULBL3SR | nonstructural protein P125-2 [pestivirus type I] | gi\|2707597 | 3 | 437 | 95 | 97 | HULBL38 | |
| | | >sp\|O57114\|O57114 NONSTRUCTURAL | | | | | | | |
| | | PROTEIN P 125-2 (FRAGMENT). Length = 239 | | | | | | | |
| 834 | HNTBK49R | p60 [Homo sapiens]>sp\|Q13446\|Q13446 EBI3- | gi\|1145799 | 3 | 368 | 100 | 100 | HNTBK49 | |
| | | ASSOCIATED PROTEIN P60. >gi\|3283216 | | | | | | | |
| | | (AF060494) ubiquitin binding protein p62 | | | | | | | |
| | | [Homo sapiens]{SUB 1-72} Length = 440 | | | | | | | |
| 835 | HBAFS48R | Phalaenopsis sp. ‘hybrid SM9108’ actin | gi1602958 | 2 | 316 | 91 | 92 | HBAFS48 | |
| | | [Phalaenopsis sp.] ‘hybrid SM9108’] | | | | | | | |
| | | >sp\|Q40981\|Q40981 ACTIN (FRAGMENT). | | | | | | | |
| | | Length = 208 | | | | | | | |
| 836 | HHGAL60R | PIPPin protein [Rattus norvegicus] | gi\|1050754 | 2 | 319 | 66 | 81 | HHGAL60 | |
| | | >pir\|JC4588\|JC4588 RNA-binding protein | | | | | | | |
| | | PIPPin-rat >sp\|Q63430\|Q63430 PIPPIN | | | | | | | |
| | | PROTEIN. Length = 154 | | | | | | | |
| 837 | HOHBU75R | prepro-alpha-1 collagen [Homo sapiens] | gi135658 | 104 | 373 | 71 | 72 | HOHBU75 | |
| | | >sp\|Q15201\|Q15201 PREPRO-ALPHA-1 | | | | | | | |
| | | COLLAGEN PRECURSOR (FRAGMENT). | | | | | | | |
| | | Length = 181 | | | | | | | |
| 838 | HHEFZ79R | progesterone-induced protein [Oryctolagus | gi\|165009 | 293 | 484 | 73 | 77 | HHEFZ79 | |
| | | cuniculus]>pir\|A26998\|A26998 progesterone- | | | | | | | |
| | | induced protein, endometrial-rabbit Length = | | | | | | | |
| | | 370 | | | | | | | |
| 839 | HSLBA61R | proteasome subunit C5 [Homo sapiens] | gnl\|PID\|d1001116 | 45 | 224 | 96 | 96 | HSLBA61 | |
| | | >gnl\|PID\|e1334433 (AL031259) C5 (proteasome | | | | | | | |
| | | subunit HC5) [Homo sapiens] | | | | | | | |
| | | >pir\|S15973\|SNHUC5 multicatalytic | | | | | | | |
| | | endopeptidase complex (EC 3.4.99.46) chain C5- | | | | | | | |
| | | human >sp\|P20618\|PRC5_HUMAN | | | | | | | |
| | | PROTEASOME COMPONENT C5 (EC 3.4.99.4 | | | | | | | |
| 840 | HPEAE18R | put. ORF [Homo sapiens]>pir\|I38022\|I38022 | gi\|288145 | 55 | 234 | 57 | 67 | HPEAE18 | |
| | | hypothetical protein-human | | | | | | | |
| | | >sp\|Q29976\|Q29976 MAHLAVU | | | | | | | |
| | | HEPATOCELLULAR CARCINOMA HHC(M) | | | | | | | |
| | | DNA. Length = 196 | | | | | | | |
| 841 | HNGFO65R | ren(exclusion;96) [Bacteriophage lambda] | gi\|215152 | 3 | 203 | 48 | 59 | HNGFO65 | |
| | | >pir\|F43010\|ZRBPL ren protein-phage lambda | | | | | | | |
| | | Length = 96 | | | | | | | |
| 842 | HKAKR61R | ribosmal protein small subunit [Homo sapiens] | gi\|306553 | 3 | 458 | 91 | 91 | HKAKR61 | |
| | | Length = 264 | | | | | | | |
| 843 | H2LAP11R | ribosomal phosphoprotein P1 (AA 1-114) [Rattus | gi\|57710 | 169 | 549 | 100 | 100 | H2LAP11 | |
| | | rattus]>pir\|S08022\|R5RT12 acidic ribosomal | | | | | | | |
| | | protein P1-rat Length = 114 | | | | | | | |
| 844 | H2CBD90R | ribosomal protein L10 [Homo sapiens] | gi\|414587 | 199 | 501 | 95 | 95 | H2CBD90 | |
| | | >sp\|D1026771\|D1026771 RIBOSOMAL | | | | | | | |
| | | PROTEIN L15 (FRAGMENT). {SUB 16-57} | | | | | | | |
| | | Length = 205 | | | | | | | |
| 845 | H2LAD40R | ribosomal protein L15 gene product [Rattus | gi\|515865 | 156 | 524 | 100 | 100 | H2LAD40 | |
| | | norvegicus]>pir\|JC2369\|JC2369 ribosomal | | | | | | | |
| | | protein L15-rat Length = 204 | | | | | | | |
| 846 | HCYBK51R | ribosomal protein L37 [Homo sapiens] | gi\|292441 | 2 | 412 | 97 | 98 | HCYBK51 | |
| | | >bbs\|172744 ribosomal protein L37 {C2-C2 | | | | | | | |
| | | zinc-finger-like} [human, HeLa cells, Peptide, 97 | | | | | | | |
| | | aa] [Homo sapiens]>gnl\|PID\|d1005426 | | | | | | | |
| | | ribosomal protein L37 [Homo sapiens]>gi\|57121 | | | | | | | |
| | | ribosomal protein L37 [Rattus norvegicus]> | | | | | | | |
| 847 | H2MBC73R | ribosomal protein L37a [Homo sapiens] | gi\|292439 | 2 | 385 | 100 | 100 | H2MBC73 | |
| | | >gi\|36134 ribosomal protein L37a [Homo | | | | | | | |
| | | sapiens]>gi\|57123 ribosomal protein L37a (AA | | | | | | | |
| | | 1-92) [Rattus rattus]>gi\|312414 ribosomal | | | | | | | |
| | | protein L37a [Mus musculus] | | | | | | | |
| | | >pir\|S05014\|R5RT37 ribosomal protein L37a- | | | | | | | |
| | | rat >pir\|S42109 | | | | | | | |
| 848 | H2MBU27R | ribosomal protein L37a [Homo sapiens] | gi\|292439 | 2 | 286 | 100 | 100 | H2MBU27 | |
| | | >gi\|36134 ribosomal protein L37a [Homo | | | | | | | |
| | | sapiens]>gi\|57123 ribosomal protein L37a (AA | | | | | | | |
| | | 1-92) [Rattus rattus]>gi\|312414 ribosomal | | | | | | | |
| | | protein L37a [Mus musculus] | | | | | | | |
| | | >pir\|S05014\|R5RT37 ribosomal protein L37a- | | | | | | | |
| | | rat >pir\|S42109 | | | | | | | |
| 849 | HDSAH53R | ribosomal protein L37a [Homo sapiens] | gi\|292439 | 3 | 341 | 97 | 97 | HDSAH53 | |
| | | >gi\|36134 ribosomal protein L37a [Homo | | | | | | | |
| | | sapiens]>gi\|57123 ribosomal protein L37a (AA | | | | | | | |
| | | 1-92) [Rattus rattus]>gi\|312414 ribosomal | | | | | | | |
| | | protein L37a [Mus musculus] | | | | | | | |
| | | >pir\|S05014\|R5RT37 ribosomal protein L37a- | | | | | | | |
| | | rat >pir\|S42109 | | | | | | | |
| 850 | HAIDF69R | ribosomal protein L7a [Fugu rubripes] Length = | gnl\|PID\|e1248480 | 179 | 250 | 93 | 100 | HAIDF69 | |
| | | 266 | | | | | | | |
| 851 | HDBAA15R | ribosomal protein L8 [Homo sapiens]>gi\|57704 | gi\|433899 | 220 | 429 | 85 | 88 | HDBAA15 | |
| | | ribosomal protein L8 [Rattus rattus]>gi\|1527178 | | | | | | | |
| | | ribosomal protein L8 [Mus musculus] | | | | | | | |
| | | >pir\|JU0177\|R5RTL8 ribosomal protein L8, | | | | | | | |
| | | cytosolic-rat >pir\|JN0923\|JNO923 ribosomal | | | | | | | |
| | | protein L8, cytosolic-human >gi\|3851 | | | | | | | |
| 852 | HDTHW54R | ribosomal protein S12 (AA 1-132) [Mus | gi\|54006 | 3 | 332 | 89 | 89 | HDTHW54 | |
| | | musculus]>pir\|S13074\|R3RT12 ribosomal | | | | | | | |
| | | protein S12-rat >pir\|S05492\|R3MS12 ribosomal | | | | | | | |
| | | protein S12-mouse >gi\|206741 ribosomal | | | | | | | |
| | | protein S12 [Rattus norvegicus]{SUB 1-130} | | | | | | | |
| | | Length = 132 | | | | | | | |
| 853 | HTWJC11R | ribosomal protein S13 [Homo sapiens] | gi\|307391 | 1 | 276 | 97 | 97 | HTWJC11 | |
| | | >gi\|488417 ribosomal protein S13 [Homo | | | | | | | |
| | | sapiens]>gnl\|PID\|d1014222 ribosomal protein | | | | | | | |
| | | S13 [Homo sapiens]>gi\|57730 ribosomal protein | | | | | | | |
| | | S13 [Rattus rattus]>pir\|S34109\|S34109 | | | | | | | |
| | | ribosomal protein S13, cytosolic-human >pir\|A3 | | | | | | | |
| 854 | HKAEC40R | ribosomal protein S24 [Homo sapiens] | gi\|337506 | 93 | 407 | 83 | 84 | HKAEC40 | |
| | | >gi\|S17222 ribosomal protein S24 [Homo | | | | | | | |
| | | sapiens]>gi\|49652 ribosomal protein S19 (AA 1- | | | | | | | |
| | | 133) [Mesocricetus auratus]>gi\|57858 | | | | | | | |
| | | ribosomal protein S24 [Rattus norvegicus] | | | | | | | |
| | | >gi\|57722 ribosomal protein S24 (AA 1-133) | | | | | | | |
| | | [Rattus | | | | | | | |
| 855 | HCFNM70R | ribosomal protein S4X isoform [Homo sapiens] | gi\|337510 | 3 | 278 | 96 | 97 | HCFNM70 | |
| | | >gi\|2791861 (AF041428) ribosomal protein s4X | | | | | | | |
| | | isoform [Homo sapiens]>gi\|200864 ribosomal | | | | | | | |
| | | protein S4 [Mus musculus]>gi\|57135 ribosomal | | | | | | | |
| | | protein S4 (AA 1-263) [Rattus rattus] | | | | | | | |
| | | >gnl\|PID\|d1002335 ribosomal protei | | | | | | | |
| 856 | HKBAB93R | ribosomal protein S8 [Homo sapiens]>gi\|57139 | gi\|36150 | 2 | 391 | 87 | 90 | HKBAB93 | |
| | | ribosomal protein S8 (AA 1-208) [Rattus | | | | | | | |
| | | norvegicus]>gi\|313298 ribosomal protein S8 | | | | | | | |
| | | [Mus musculus]>pir\|S01609\|R3RT8 ribosomal | | | | | | | |
| | | protein S8-rat >pir\|S42110\|S42110 ribosomal | | | | | | | |
| | | protein S8-mouse >pir\|S25022\|S2502 | | | | | | | |
| 857 | HLHEJ79R | RNA polymerase II subunit hRPBI7 [Homo | gi\|854177 | 129 | 446 | 83 | 86 | HLHEJ79 | |
| | | sapiens]>pir\|S55370\|S55370 RNA polymerase II | | | | | | | |
| | | chain hRPB17-human Length = 150 | | | | | | | |
| 858 | HBGOI24R | 519 ribosomal protein [Homo sapiens] | gi\|337733 | 2 | 421 | 99 | 100 | HBGOI24 | |
| | | >pir\|I52692\|I52692 ribosomal protein S19, | | | | | | | |
| | | cytosolic-human Length = 145 | | | | | | | |
| 859 | HNDAD16R | secretory protein [Homo sapiens]>gi\|940946 | gi\|402483 | 3 | 380 | 71 | 78 | HNDAD16 | |
| | | intestinal trefoil factor [Homo sapiens] | | | | | | | |
| | | >pir\|A48284\|A48284 intestinal trefoil factor 3 | | | | | | | |
| | | precursor-human >sp\|Q07654\|ITF_HUMAN | | | | | | | |
| | | INTESTINAL TREFOIL FACTOR | | | | | | | |
| | | PRECURSOR (HP1.B). Length = 80 | | | | | | | |
| 860 | HMAEA94R | serine/threonine protein kinase [Homo sapiens] | gnl\|PID\|e293330 | 3 | 422 | 95 | 95 | HMAEA94 | |
| | | >gnl\|PID\|e1154172 (AJ000512) serine/threonine | | | | | | | |
| | | protein kinase [Homo sapiens] Length = 431 | | | | | | | |
| 861 | HMWEA08R | signal recognition particle subunit 9 [Homo | gi\|897851 | 119 | 394 | 90 | 93 | HMWEA08 | |
| | | sapiens]>pir\|A57292\|A57292 signal recognition | | | | | | | |
| | | particle protein SRP9-human Length = 86 | | | | | | | |
| 862 | H6BSO48R | similar to Drosophila photoreceptor cell-specific | gnl\|PID\|d1012153 | 1 | 528 | 95 | 95 | H6BS048 | |
| | | protein, calphotin. [Homo sapiens] | | | | | | | |
| | | >sp\|Q14676\|Q14676 KIAA0170 PROTEIN. | | | | | | | |
| | | Length = 2089 | | | | | | | |
| 863 | HRACC09R | smooth muscle protein [Homo sapiens] | gi\|177175 | 1 | 117 | 100 | 100 | HRACC09 | |
| | | >pir\|JS0774\|JS0774 smooth muscle protein | | | | | | | |
| | | SM22-human Length = 201 | | | | | | | |
| 864 | HOEEC67R | smooth muscle protein SM22 homolog-mouse | pir\|A60598\|A60598 | 105 | 230 | 100 | 100 | HOEEC67 | |
| | | Length = 201 | | | | | | | |
| 865 | HPFEA40R | t-complex polypeptide 1 (AA 1-556) [Homo | gi\|36796 | 3 | 497 | 98 | 99 | HPFEA40 | |
| | | sapiens] Length = 556 | | | | | | | |
| 866 | HODAV31R | tissue inhibitor of metalloproteinases ]Homo | gnl\|PID\|d1002390 | 1 | 273 | 64 | 67 | HODAV31 | |
| | | sapiens] Length = 166 | | | | | | | |
| 867 | HHECI89R | transaldolase [Homo sapiens]>gi\|2612879 | gi\|2073541 | 3 | 371 | 99 | 99 | HHECI89 | |
| | | (AF010400) transaldolase-related protein [Homo | | | | | | | |
| | | sapiens]>sp\|O00751\|O00751 | | | | | | | |
| | | TRANSALDOLASE (EC 2.2.1.2). >gi\|1480787 | | | | | | | |
| | | transaldolase [Homo sapiens] {SUB 302-337} | | | | | | | |
| | | Length = 337 | | | | | | | |
| 868 | HSDFV03R | translocase [Bos taurus]>pir\|B43646\|B43646 | gi\|529417 | 20 | 412 | 92 | 96 | HSDFV03 | |
| | | ADP,ATP carrier protein T2-bovine | | | | | | | |
| | | >sp\|P32007\|ADT3_BOVIN ADP,ATP | | | | | | | |
| | | CARRIER PROTEIN, ISOFORM T2 (ADP/ATP | | | | | | | |
| | | TRANSLOCASE 3) (ADENINE NUCLEOTIDE | | | | | | | |
| | | TRANSLOCATOR 3) (ANT 3). Length = 298 | | | | | | | |
| 869 | HTXPN01R | triose-phosphate isomerase [Pan troglodytes] | gi\|176960 | 3 | 281 | 98 | 98 | HTXPN01 | |
| | | >gi\|37247 triosephosphate isomerase [Homo | | | | | | | |
| | | sapiens]>gi\|1200507 triosephosphate isomerase | | | | | | | |
| | | [Homo sapiens]>gi\|339841 triosephosphate | | | | | | | |
| | | isomerase (EC 5.3.1.1) [Homo sapiens] | | | | | | | |
| | | >pir\|S29743\|ISHUT triose-phosphate isomer | | | | | | | |
| 870 | HHPSA49R | tuberin [Homo sapiens] Length = 1784 | gi\|450352 | 2 | 451 | 69 | 69 | HHPSA49 | |
| 871 | H2LAT88R | type II mesothelial keratin K7 [Homo sapiens] | gi\|386851 | 1 | 567 | 91 | 91 | H2LAT88 | |
| | | >sp\|Q92676\|Q92676 MESOTHELIAL | | | | | | | |
| | | KERATIN K7 (TYPE II) (FRAGMENT). Length = | | | | | | | |
| | | 489 | | | | | | | |
| 872 | H6EAD58R | | | 49 | 174 | | | H6EAD58 | |
| 873 | HACBH95R | | | 2 | 364 | | | HACBH95 | |
| 874 | HACBY16R | | | 1 | 84 | | | HACBY16 | |
| 875 | HAGCI33R | | | 2 | 238 | | | HAGCI33 | |
| 876 | HAHAD34R | | | 61 | 123 | | | HAHAD34 | |
| 877 | HAJAN69R | | | 67 | 294 | | | HAJAN69 | |
| 878 | HALSG52R | | | 41 | 268 | | | HALSG52 | |
| 879 | HAPPR17R | | | 180 | 311 | | | HAPPR17 | |
| 880 | HAQCG78R | | | 3 | 110 | | | HAQCG78 | |
| 881 | HAUBY86R | | | 23 | 118 | | | HAUBY86 | |
| 882 | HAVAA34R | | | 1 | 117 | | | HAVAA34 | |
| 883 | HBAFK20R | | | 2 | 355 | | | HBAFK20 | |
| 884 | HBGBE20R | | | 31 | 315 | | | HBGBE20 | |
| 885 | HBJBR66R | | | 2 | 52 | | | HBJBR66 | |
| 886 | HBJMU59R | | | 2 | 208 | | | HBJMU59 | |
| 887 | HBKDK63R | | | 147 | 647 | | | HBKDK63 | |
| 888 | HBMVT43R | | | 2 | 70 | | | HBMVT43 | |
| 889 | HCDAM59R | | | 21 | 125 | | | HCDAM59 | |
| 890 | HCFLN25R | | | 3 | 224 | | | HCFLN25 | |
| 891 | HCQAW59R | | | 1 | 129 | | | HCQAW59 | |
| 892 | HDPMA46R | | | 223 | 420 | | | HDPMA46 | |
| 893 | HDTAQ26R | | | 177 | 296 | | | HDTAQ26 | |
| 894 | HDTAT40R | | | 1 | 213 | | | HDTAT40 | |
| 895 | HDTLD39R | | | 323 | 496 | | | HDTLD39 | |
| 896 | HE2PO63R | | | 39 | 278 | | | HE2P063 | |
| 897 | HELCV09R | | | 1 | 72 | | | HELCV09 | |
| 898 | HELHK95R | | | 3 | 383 | | | HELHK95 | |
| 899 | HEMGL70R | | | 2 | 172 | | | HEMGL70 | |
| 900 | HETIB72R | | | 2 | 100 | | | HETIB72 | |
| 901 | HFFAS19R | | | 2 | 256 | | | HFFAS19 | |
| 902 | HFIYH65R | | | 68 | 259 | | | HFIYH65 | |
| 903 | HFXAF89R | | | 143 | 361 | | | HFXAF89 | |
| 904 | HHEPR03R | | | 89 | 307 | | | HHEPR03 | |
| 905 | HHGAQ80R | | | 2 | 202 | | | HHGAQ80 | |
| 906 | HHSEF82R | | | 170 | 304 | | | HHSEF82 | |
| 907 | HKBAA63R | | | 239 | 469 | | | HKBAA63 | |
| 908 | HKIXO47R | | | 2 | 94 | | | HKIXO47 | |
| 909 | HLDNF70R | | | 3 | 176 | | | HLDNF70 | |
| 910 | HLQFO33R | | | 62 | 268 | | | HLQFO33 | |
| 911 | HLWBC80R | | | 46 | 543 | | | HLWBC80 | |
| 912 | HLYAV50R | | | 3 | 224 | | | HLYAV50 | |
| 913 | HMEKY67R | | | 3 | 302 | | | HMEKY67 | |
| 914 | HMTBN58R | | | 3 | 377 | | | HMTBN58 | |
| 915 | HNGAZ91R | | | 22 | 276 | | | HNGAZ91 | |
| 916 | HNTAC06R | | | 2 | 133 | | | HNTAC06 | |
| 917 | HOGAF41R | | | 1 | 228 | | | HOGAF41 | |
| 918 | HOUDQ92R | | | 75 | 323 | | | HOUDQ92 | |
| 919 | HPEAD91R | | | 60 | 233 | | | HPEAD91 | |
| 920 | HPIAF72R | | | 128 | 310 | | | HPJAF72 | |
| 921 | HPJAU01R | | | 122 | 334 | | | HPIAU01 | |
| 922 | HPIAU73R | | | 99 | 275 | | | HPIAU73 | |
| 923 | HPIAW19R | | | 102 | 350 | | | HPIAW19 | |
| 924 | HPIAZ19R | | | 238 | 348 | | | HPJAZ19 | |
| 925 | HPIBA31R | | | 245 | 367 | | | HPIBA31 | |
| 926 | HPIBS06R | | | 84 | 182 | | | HPIBS06 | |
| 927 | HPJCB65R | | | 2 | 430 | | | HPICB65 | |
| 928 | HPJBF22R | | | 220 | 330 | | | HPJBF22 | |
| 929 | HPJBZ81R | | | 214 | 384 | | | HPJBZ81 | |
| 930 | HRACF81R | | | 1 | 189 | | | HRACF81 | |
| 931 | HRACT28R | | | 110 | 319 | | | HRACT28 | |
| 932 | HSBAP03R | | | 123 | 263 | | | HSBAP03 | |
| 933 | HSDJK57R | | | 234 | 458 | | | HSDJK57 | |
| 934 | HSIFY54R | | | 1 | 321 | | | HSIFY54 | |
| 935 | HSLDJ92R | | | 24 | 275 | | | HSLDJ92 | |
| 936 | HSLJI47R | | | 185 | 379 | | | HSLJI47 | |
| 937 | HTSGE55R | | | 36 | 209 | | | HTSGE55 | |
| 938 | HUFAT72R | | | 276 | 410 | | | HUFAT72 | |
| 939 | HULAI70R | | | 176 | 337 | | | HULAI70 | |
| 940 | HTGFW12R | yeast mismatch repair gene PMS1 homologue | gnl\|PID\|d1008092 | 3 | 233 | 94 | 97 | HTGFW12 | |
| | | [Homo sapiens]>gnl\|PID\|d1008050 homologue | | | | | | | |
| | | of yeast PMS1 [Homo sapiens] | | | | | | | |
| | | >sp\|Q16530\|Q16530 PMS3 MRNA (YEAST | | | | | | | |
| | | MISMATCH REPAIR GENE PMS1 | | | | | | | |
| | | HOMOLOGUE), PARTIAL CDS (C- | | | | | | | |
| | | TERMINAL REGION) (FRAGMENT). Length = | | | | | | | |
| | | 256 | | | | | | | |

[0040] The first column of Table 1 shows the “SEQ ID NO:” for each of the 940 prostate cancer antigen polynucleotide sequence of the invention.

[0041] The second column in Table 1, provides a unique “Sequence/Contig ID” column in Table 1, “Gene Name,” provides a putative identification of the gene based on the sequence similarity of its translation product to an amino acid sequence found in a publicly accessible gene database, such as GenBank (NCBI). The great majority of the cDNA sequence reported in Table 1 are unrelated to any sequences previously described in the literature. The fourth column, in Table 1, “Overlap,” provides the database accession no for the database sequence having similarity. The fifth and sixth columns in “End”, in the polynucleotide sequence “SEQ ID NO:X” that delineate the preferred ORF shown in the sequence listing as SEQ ID NO:Y. In one embodiment, the invention provides a protein comprising, or alternatively consisting of, a polypeptide encoded by the portion of SEQ ID NO:X delineated by the nucleotide position nos. “Start” and “End”. Also provided are polynucleotides encoding such proteins and the complementary stand thereto. The seventh and eighth columns provide the “% Id” (percent identity) and “% Si” (precent similarity) observed between the aligned sequence segments of the translation product of SEQ ID NO:X and the datsbase sequence.

[0042] The ninth column of Table 1 provides a unique “Clone ID” for a clone related to each contig sequence. This clone ID referencees the cDNA clone which contains at least the 5′ most sequence of the assembled contig and at least a portion of SEQ ID may have more sequence than described in the sequence listing or the clone may have less. In the vast majority of cases, however, the clone is believed to encode a full-length polypeptide. In the case where a clone is not full-length, a full-length cDNA can be obtained by methods described elsewhere herein.

[0043] Table 3 indicates public ESTs, of which at least one, two, three, four, five, ten or more of any one or more of these public ESTs are optionally excluded from the invention.

[0044] SEQ ID NO:X (where X may be any of the polynucleotide sequences disclosed in the sequence listing as SEQ ID NO:1 through SEQ ID NO:940) and the translated SEQ ID NO:Y (where Y may be any of the polypeptide sequences disclosed in the sequence listing as SEQ ID NO:941 through SEQ ID NO:1880) are sufficiently accurate and otherwise suitable for a variety of uses well known in the art and decribed further below. For instance, SEQ ID NO:X has uses including, but not limited to, in designing nucleic acid hybridization probes that will detect nucleic acid sequences contained in SEQ ID NO:X or the related cDNA clone contained in a library deposited with the ATCC. These probes will also hybridize to nucleic acid molecules in biological samples, thereby enabling immediate applications in chromosome mapping, linkage analysis, tissue identification and/or typing, and a variety of forensic and diagnostic methods of the invention. Similarly, polypeptides identified from SEQ ID NO:Y have uses that include, but are not limited to, generating antibodies which bind specifically to the prostate cancer antigen polypeptides, or fragments thereof, and/or to the prostate cancer antigen polypeptides encoded by the cDNA clones identified in Table 1.

[0045] Nevertheless, DNA sequences generated by sequencing reactions can contain sequencing errors. The errors exist as misidentified nucleotides, or as insertions or deletions of nucleotides in the generated DNA sequence. The erroneously inserted or deleted nucleotides cause frame shifts in the reading frames of the predicted amino acid sequence. In these cases, the predicted amino acid sequence diverges from the actual amino acid sequence, even though the generated DNA sequence may be greater than 99.9% identical to the actual DNA sequence (for example, one base insertion or deletion in an open reading frame of over 1000 bases).

[0046] Accordingly, for those applications requiring precision in the nucleotide sequence or the amino acid sequence, the present invention provides not only the generated nucleotide sequence identified as SEQ ID NO:X, the predicted translated amino acid sequence identified as SEQ ID NO:Y, but also a sample of plasmid DNA containing the related cDNA clone (deposited with the ATCC, as set forth in Table 1). The nucleotide sequence of each deposited clone can readily be determined by sequencing the deposited clone in accordance with known methods. Further, techniques known in the art can be used to verify the nucleotide sequences of SEQ ID NO:X.

[0047] The predicted amino acid sequence can then be verified from such deposits. Moreover, the amino acid sequence of the protein encoded by a particular clone can also be directly determined by peptide sequencing or by expressing the protein in a suitable host cell containing the deposited human cDNA, collecting the protein, and determining its sequence.

[0048] The present invention also relates to vectors or plasmids which include such DNA sequences, as well as the use of the DNA sequences. The material deposited with the ATCC on:

TABLE 2

| | Deposit | |
|---|---|---|
| ATCC Deposits | Date | ATCC Designation Number |
| LP01, LP02, LP03, LP04, | May-20-97 | 209059, 209060, 209061, |
| | | 209062, 209063, |
| LP05, LP06, LP07, LP08, | | 209064, 209065, 209066, |
| | | 209067, 209068, |
| LP09, LP10, LP11, | | 209069 |
| LP12 | Jan-12-98 | 209579 |
| LP13 | Jan-12-98 | 209578 |
| LP14 | Jul-16-98 | 203067 |
| LP15 | Jul-16-98 | 203068 |
| LP16 | Feb-1-99 | 203609 |
| LP17 | Feb-1-99 | 203610 |
| LP20 | Nov-17-98 | 203485 |
| LP21 | Jun-18-99 | PTA-252 |
| LP22 | Jun-18-99 | PTA-253 |
| LP23 | Dec-22-99 | PTA-1081 |

[0049] each is a mixture of cDNA clones derived from a variety of human tissue and cloned in either a plasmid vector or a phage vector, as shown in Table 5. These deposits are referred to as “the deposits” herein. The tissues from which the clones were derived are listed in Table 5, an the vector in which the cDNA is contained is also indicated in Table 5. The deposited material includes the cDNA clones which were partially sequenced and are related to the SEQ ID NO:X described in Table 1 (column 9). Thus, a clone which is isolatable from the ATCC Deposits by use of a sequence listed as SEQ ID NO:X may include the entire coding region of a human gene or in other cases such clone may include a substantial portion of the coding region of a human gene. Although the sequence listing lists only a portion of the DNA sequence in a clone included in the ATCC Deposits, it is well within the ability of one skilled in the art to complete the sequence of the DNA included in a clone isolatable from the ATCC Deposits by use of a sequence (or portion thereof) listed in Table 1 by procedures hereinafter further described, and others apparent to those skilled in the art.

[0050] Also provided in Table 5 is the name of the vector which contains the cDNA clone. Each vector is routinely used in the art. The following additional information is provided for convenience.

[0051] Vectors Lambda Zap (U.S. Pat. Nos. 5,128,256 and 5,286,636), Uni-Zap XR (U.S. Pat. Nos. 5,128,256 and 5,286,636), Zap Express (U.S. Pat. Nos. 5,128,256 and 5,286,636), pBluescript (pBS) (Short, J. M. et al., Nucleic Acids Res. 16:7583-7600 (1988); Alting-Mees, M. A. and Short, J. M., Nucleic Acids Res. 17:9494 (1989)) and pBK (Alting-Mees, M. A. et al., Strategies 5:58-61 (1992)) are commercially available from Stratagene Cloning Systems, Inc., 11011 N. Torrey Pines Road, La Jolla, Calif., 92037. pBS Phagemid pBS may be excised from the Lambda Zap and Uni-Zap XR vectors, and phagemid pBK may be excised from the Zap Express vector. Both phagemids may be transformed into E. coli strain XL-1 Blue, also available from Stratagene.

[0052] Vectors pSport1, pCMVSport 1.0, pCMVSport 2.0 and pCMVSport 3.0, were obtained from Life Technologies, Inc., P. O. Box 6009, Gaithersburg, Md. 20897. All Sport vectors contain an ampicillin resistance gene and may be transformed into E. coli strain DH10B, also available from Life Technologies. See, for instance, Gruber, C. E., et al., Focus 15:59 (1993). Vector lafmid BA (Bento Soares, Columbia University, New York, N.Y.) contains an ampicillin resistance gene and can be transformed into E. coli strain XL-1 Blue. Vector pCR®2.1, which is available from Invitrogen, 1600 Faraday Avenue, Carlsbad, Calif. 92008, contains an ampicillin resistance gene and may be transformed into E. coli strain DH10B, available from Life Technologies. See, for instance, Clark, J. M., Nuc. Acids Res. 16:9677-9686 (1988) and Mead, D. et al., Bio/Technology 9: (1991).

[0053] The present invention also relates to the genes corresponding to SEQ ID NO:X, SEQ ID NO:Y, and/or the cDNA contain in a deposited cDNA clone. The corresponding gene can be isolated in accordance with known methods using the sequence information disclosed herein. Such methods include, but are not limited to, preparing probes or primers from the disclosed sequence and identifying or amplifying the corresponding gene from appropriate sources of genomic material.

[0054] Also provided in the present invention are allelic variants, orthologs, and/or species homologs. Procedures known in the art can be used to obtain full-length genes, allelic variants, splice variants, full-length coding portions, orthologs, and/or species homologs of genes corresponding to SEQ ID NO:X, SEQ ID NO:Y, and/or the cDNA contained in the related cDNA clone in the deposit, using information from the sequences disclosed herein or the clones deposited with the ATCC. For example, allelic variants and/or species homologs may be isolated and identified by making suitable probes or primers from the sequences provided herein and screening a suitable nucleic acid source for allelic variants and/or the desired homologue.

[0055] The present invention provides a polynucleotide comprising, or alternatively consisting of, the nucleic acid sequence of SEQ ID NO:X, and/or the related cDNA clone (See, e.g., columns 1 and 9 of Table 1). The present invention also provides a polypeptide comprising, or alternatively, consisting of, the polypeptide sequence of SEQ ID NO:Y, a polypeptide encoded by SEQ ID NO:X, and/or a polypeptide encoded by the cDNA in the related cDNA clone contained in a deposited library. Polynucleotides encoding a polypeptide comprising, or alternatively consisteing of, the polypeptide sequence of SEQ ID NO:Y, a polypeptide encoded by SEQ ID NO:X, and/or a polypeptide encoded by the the dDNA in the related cDNA clone contained in a deposited library, are also encompassed by the invention. The present invention further encompasses a polynucleotide comprising, or alternatively consisting of, the complement of the nucleic acid sequence of SEQ ID NO:X, and/or the complement of the coding strand of the related cDNA clone contained in a deposited library.

[0056] Many polynucleotide sequences, such as EST sequences, are publicly available and accessible through sequence databases and may have been publicly available prior to conception of the present invention. Preferably, such related polynucleotides are specifically excluded from the scope of the present invention. To list every related sequence would unduly burden the disclosure of this application. Accordingly, for each “Contig Id” listed in the first column of Table 3, preferably excluded are one or more polynucleotides comprising a nucleotide sequence described in the second column of Table 3 by the general formula of a-b, each of which are uniquely defined for the SEQ ID NO:X corresponding to that Contig Id in Table 1. Additionally, specific embodiments are directed to polynucleotide sequences excluding at least one, two, three, four, five, ten, or more of the specific polynucleotide sequences referenced by the Genbank Accession No. for each Contig Id which may be included in column 3 of Table 3. In no way is this listing meant to encompass all of the sequences which may be excluded by the general formula, it is just a representative example.

TABLE 3

| Sequence/Contig ID | General formula | Genbank Accession No. |
|---|---|---|
| 574130 | Preferably excluded from the present invention are one or more | |
| | polynucleotides comprising a nucleotide sequence described by the | |
| | general formula of a-b, where a is any integer between 1 to 703 of | |
| | SEQ ID NO:1, b is an integer of 15 to 717, where both a and b | |
| | correspond to the positions of nucleotide residues shown in SEQ ID | |
| | NO:1, and where b is greater than or equal to a +14. | |
| 637706 | Preferably excluded from the present invention are one or more | |
| | polynucleotides comprising a nucleotide sequence described by the | |
| | general formula of a-b, where a is any integer between 1 to 1611 of | |
| | SEQ ID NO:2, b is an integer of 15 to 1625, where both a and b | |
| | correspond to the positions of nucleotide residues shown in SEQ ID | |
| | NO:2, and where b is greater than or equal to a +14. | |
| 638162 | Preferably excluded from the present invention are one or more | R78923, R79022, H78714, H78726, H79487, H79500, H86682, |
| | polynucleotides comprising a nucleotide sequence described by the | H99479, N22197, N28292, N48317, N49043, N79526, W16679, |
| | general formula of a-b, where a is any integer between 1 to 2421 of | AA017524, AA017582, AA215755, AA463914 |
| | SEQ ID NO:3, b is an integer of 15 to 2435, where both a and b | |
| | correspond to the positions of nucleotide residues shown in SEQ ID | |
| | NO:3, and where b is greater than or equal to a +14. | |
| 684310 | Preferably excluded from the present invention are one or more | R00703, R79938, R80028, N75501, N99910, W25289 |
| | polynucleotides comprising a nucleotide sequence described by the | |
| | general formula of a-b, where a is any integer between 1 to 972 of | |
| | SEQ ID NO:4, b is an integer of 15 to 986, where both a and b | |
| | correspond to the positions of nucleotide residues shown in SEQ ID | |
| | NO:4, and where b is greater than or equal to a +14. | |
| 731016 | Preferably excluded from the present invention are one or more | |
| | polynucleotides comprising a nucleotide sequence described by the | |
| | general formula of a-b, where a is any integer between 1 to 356 of | |
| | SEQ ID NO:5, b is an integer of 15 to 370, where both a and b | |
| | correspond to the positions of nucleotide residues shown in SEQ ID | |
| | NO:5, and where b is greater than or equal to a +14. | |
| 827771 | Preferably excluded from the present invention are one or more | |
| | polynucleotides comprising a nucleotide sequence described by the | |
| | general formula of a-b, where a is any integer between 1 to 497 of | |
| | SEQ ID NO:6, b is an integer of 15 to 511, where both a and b | |
| | correspond to the positions of nucleotide residues shown in SEQ ID | |
| | NO:6, and where b is greater than or equal to a +14. | |
| 828193 | Preferably excluded from the present invention are one or more | |
| | polynucleotides comprising a nucleotide sequence described by the | |
| | general formula of a-b, where a is any integer between 1 to 704 of | |
| | SEQ ID NO:7, b is an integer of 15 to 718, where both a and b | |
| | correspond to the positions of nucleotide residues shown in SEQ ID | |
| | NO:7, and where b is greater than or equal to a +14. | |
| 828194 | Preferably excluded from the present invention are one or more | |
| | polynucleotides comprising a nucleotide sequence described by the | |
| | general formula of a-b, where a is any integer between 1 to 431 of | |
| | SEQ ID NO:8, b is an integer of 15 to 445, where both a and b | |
| | correspond to the positions of nucleotide residues shown in SEQ ID | |
| | NO:8, and where b is greater than or equal to a +14. | |
| 828199 | Preferably excluded from the present invention are one or more | |
| | polynucleotides comprising a nucleotide sequence described by the | |
| | general formula of a-b, where a is any integer between 1 to 744 of | |
| | SEQ ID NO:9, b is an integer of 15 to 758, where both a and b | |
| | correspond to the positions of nucleotide residues shown in SEQ ID | |
| | NO:9, and where b is greater than or equal to a +14. | |
| 828221 | Preferably excluded from the present invention are one or more | T47410, T54389, T54694, T47411, T54281, T54610, T58617, |
| | polynucleotides comprising a nucleotide sequence described by the | T58667, T78082, T78249, T80561, R28515, R28663, R38862, |
| | general formula of a-b, where a is any integer between 1 to 3050 of | R54617, R54880, H08112, H08113, H16261, H16460, H22343, |
| | SEQ ID NO:10, b is an integer of 15 to 3064, where both a and b | H22344, H29551, H29643, H41933, H41980, R83220, R83221, |
| | correspond to the positions of nucleotide residues shown in SEQ ID | R85675, R89016, R89017, R99602, R99707, H58947, H58994, |
| | NO:10, and where b is greater than or equal to a +14. | H59578, H59579, H62419, H91312, H91409, N54589, N66610, |
| | | N73945, N76670, W03705, W04654, W31578, W38370, W39449, |
| | | W93512, W93513, AA024819, AA024925, AA033860, |
| | | A076628, AA159000, AA193455, AA257006, AA225275, |
| | | A483288, AA507139, AA522771, AA527181, AA534997, |
| | | A541666, AA614359, AA614596, AA622977, AA622978, |
| | | A569985, AA576092, AA659398, AA826776, AA836985, |
| | | A864814, AA904006, AA911931, AA916611, AA932076, |
| | | A991541, C06189 |
| 828235 | Preferably excluded from the present invention are one or more | A045157, AA252563, AA573229, AA935280 |
| | polynucleotides comprising a nucleotide sequence described by the | |
| | general formula of a-b, where a is any integer between 1 to 1482 of | |
| | SEQ ID NO:11, b is an integer of 15 to 1496, where both a and b | |
| | correspond to the positions of nueleotide residues shown in SEQ ID | |
| | NO:11, and where b is greater than or equal to a +14. | |
| 828236 | Preferably excluded from the present invention are one or more | |
| | polynucleotides comprising a nucleotide sequence described by the | |
| | general formula of a-b, where a is any integer between 1 to 1413 of | |
| | SEQ ID NO:12, b is an integer of 15 to 1427, where both a and b | |
| | correspond to the positions of nucleotide residues shown in SEQ ID | |
| | NO:12, and where b is greater than or equal to a +14. | |
| 828237 | Preferably excluded from the present invention are one or more | |
| | polynucleotides comprising a nucleotide sequence described by the | |
| | general formula of a-b, where a is any integer between 1 to 3534 of | |
| | SEQ ID NO:13, b is an integer of 15 to 3548, where both a and b | |
| | correspond to the positions of nucleotide residues shown in SEQ ID | |
| | NO:13, and where b is greater than or equal to a +14. | |
| 828239 | Preferably excluded from the present invention are one or more | |
| | polynucleotides comprising a nucleotide sequence described by the | |
| | general formula of a-b, where a is any integer between 1 to 452 of | |
| | SEQ ID NO:14, b is an integer of 15 to 466, where both a and b | |
| | correspond to the positions of nucleotide residues shown in SEQ ID | |
| | NO:14, and where b is greater than or equal to a +14. | |
| 828242 | Preferably excluded from the present invention are one or more | |
| | polynucleotides comprising a nucleotide sequence described by the | |
| | general formula of a-b, where a is any integer between 1 to 850 of | |
| | SEQ ID NO:15, b is an integer of 15 to 864, where both a and b | |
| | correspond to the positions of nucteotide residues shown in SEQ ID | |
| | NO:15, and where b is greater than or equal to a +14. | |
| 828247 | Preferably excluded from the present invention are one or more | |
| | polynucleotides comprising a nucleotide sequence described by the | |
| | general formula of a-b, where a is any integer between 1 to 2791 of | |
| | SEQ ID NO:16, b is an integer of 15 to 2805, where both a and b | |
| | correspond to the positions of nucleotide residues shown in SEQ ID | |
| | NO:16, and where b is greater than or equal to a +14. | |
| 828248 | Preferably excluded from the present invention are one or more | T66275, R11733, H10020, H10293, AA054067, AA127524, |
| | polynucleotides comprising a nucleotide sequence described by the | AA192628 |
| | general formula of a-b, where a is any integer between 1 to 696 of | |
| | SEQ ID NO:17, b is an integer of 15 to 710, where both a and b | |
| | correspond to the positions of nucleotide residues shown in SEQ ID | |
| | NO:17, and where b is greater than or equal to a +14. | |
| 828250 | Preferably excluded from the present invention are one or more | T52330, T52406, H58954, H59892, H80117, H95961, AA035013, |
| | polynucleotides comprising a nucleotide sequence described by the | AA233062, AA811863, AA812014, AA827886 |
| | general formula of a-b, where a is any integer between 1 to 978 of | |
| | SEQ ID NO:18, b is an integer of 15 to 992, where both a and b | |
| | correspond to the positions of nucleotide residues shown in SEQ ID | |
| | NO:18, and where b is greater than or equal to a +14. | |
| 828256 | Preferably excluded from the present invention are one or more | R19470, R43810, R43810, R68471, R84396, H48527, H72808, |
| | polynucleotides comprising a nucleotide sequence described by the | H74042, H77919, N59326, W37177, W63751, AA054952, |
| | general formula of a-b, where a is any integer between 1 to 1781 of | AA055414, AA075756, AA084216, AA167088, AA171933, |
| | SEQ ID NO: 19, b is an integer of 15 to 1795, where both a and b | AA283637, AA504517, AA526903, AA548976, AA720935, |
| | correspond to the positions of nucleotide residues shown in SEQ ID | AA743227, AA876493, AA922502, AA935236, AA977747, |
| | NO:19, and where b is greater than or equal to a +14. | AA985556, AA995834, A1085874, A1089849, N83890, AA643000 |
| 828267 | Preferably excluded from the present invention are one or more | R64277, R78171, R81344, R82497, R82551, H30248, N21678, |
| | polynucleotides comprising a nucleotide sequence described by the | N35076, N43816, N49970, N72024, N72025, W32428, W45005, |
| | general formula of a-b, where a is any integer between 1 to 695 of | W47341, W47466, AA023021, AA022495, AA160240, |
| | SEQ ID NO:20, b is an integer of 15 to 709, where both a and b | AA161105, AA160827, AA262229, AA460961, AA461270, |
| | correspond to the positions of nucleotide residues shown in SEQ ID | AA503727, AA516264, AA587486, AA618498, AA577174, |
| | NO:20, and where b is greater than or equal to a +14. | AA769656, AA806381, AA804907, AA814296, AA826741, |
| | | AA872272, AA873216, AA877503, AA887257, AA888574, |
| | | AA903406, AA946650, AI005204, F18545, AI096504, AI096416, |
| | | C01329 |
| 828269 | Preferably excluded from the present invention are one or more | |
| | polynucleotides comprising a nucleotide sequence described by the | |
| | general formula of a-b, where a is any integer between 1 to 635 of | |
| | SEQ ID NO:21, b is an integer of 15 to 649, where both a and b | |
| | correspond to the positions of nucleotide residues shown in SEQ ID | |
| | NO:21, and where b is greater than or equal to a +14. | |
| 828272 | Preferably excluded from the present invention are one or more | R19809, H18934, H19375, H26539, AA055911, AA494436, |
| | polynucleotides comprising a nucleotide sequence described by the | AA587324, AA714132, C17882, C18668 |
| | general formula of a-b, where a is any integer between 1 to 1593 of | |
| | SEQ ID N0:22, b is an integer of 15 to 1607, where both a and b | |
| | correspond to the positions of nueleotide residues shown in SEQ ID | |
| | NO:22, and where b is greater than or equal to a +14. | |
| 828273 | Preferably excluded from the present invention are one or more | H19271 |
| | polynucleotides comprising a nucleotide sequence described by the | |
| | general formula of a-b, where a is any integer between 1 to 564 of | |
| | SEQ ID NO:23, b is an integer of 15 to 578, where both a and b | |
| | correspond to the positions of nucleotide residues shown in SEQ ID | |
| | NO:23, and where b is greater than or equal to a +14. | |
| 828290 | Preferably excluded from the present invention are one or more | T59898, T59989, T94867, T94912, T65240, T65292, 166052, |
| | polynucleotides comprising a nucleotide sequence described by the | T77599, R09165, R09268, R10580, R10581, T80506, T80507, |
| | general formula of a-b, where a is any integer between 1 to 2742 of | R16318, R27636, R30800, R35595, R38849, R39241, R41395, |
| | SEQ ID NO:24, b is an integer of 15 to 2756, where both a and b | R59117, R76584, R76585, H09652, H09692, H11510, H11870, |
| | correspond to the positions of nucleotide residues shown in SEQ ID | R83218, R91788, R91789, R96324, R96325, H57286, H72668, |
| | NO:24, and where b is greater than or equal to a +14. | N74017, W02255, AA148639, AA148693, AA236061, AA236908, |
| | | AA252747, AA259022, AA262883, AA278784, AA282771, |
| | | AA284927, AA417594, AA456869, AA457026, AA482034, |
| | | AA483364, AA483699, AA742268, AA831255 |
| 828326 | Preferably excluded from the present invention are one or more | T39632, 151535, 151684, T53316, 153317, T78655, R39299, |
| | polynucleotides comprising a nucleotide sequence described by the | R50091, R50092, R60242, R60477, H15498, H16190, H16348, |
| | general formula of a-b, where a is any integer between 1 to 2666 of | H23875, H23876, H39694, H46597, H66845, H66889, H81508, |
| | SEQ ID NO:25, b is an integer of 15 to 2680, where both a and b | H83033, N71968, N99700, W00835, W42577, W60798, W60929, |
| | correspond to the positions of nucleotide residues shown in SEQ ID | A040868, AA043137, AA100392, AA133460, AA133461, |
| | NO:25, and where b is greater than or equal to a +14. | AA15130l, AA190783, AA190331, AA232148, AA244332, |
| | | AA244333, AA417836, AA468588, AA552068, AA622100, |
| | | AA570065, AA568384, AA661530, AA689348, AA748424, |
| | | AA767109, AA769292, AA809791, AA915876, AA931522, |
| | | AA983494, AI051278, N85117, W22522 |
| 828397 | Preferably excluded from the present invention are one or more | |
| | polynucleotides comprising a nucleotide sequence described by the | |
| | general formula of a-b, where a is any integer between 1 to 1845 of | |
| | SEQ ID NO:26, b is an integer of 15 to 1859, where both a and b | |
| | correspond to the positions of nucleotide residues shown in SEQ ID | |
| | NO:26, and where b is greater than or equal to a +14. | |
| 828405 | Preferably excluded from the present invention are one or more | N27583 |
| | polynucleotides comprising a nucleotide sequence described by the | |
| | general formula of a-b, where a is any integer between 1 to 620 of | |
| | SEQ ID NO:27, b is an integer of 15 to 634, where both a and b | |
| | correspond to the positions of nucleotide residues shown in SEQ ID | |
| | NO:27, and where b is greater than or equal to a +14. | |
| 828461 | Preferably excluded from the present invention are one or more | T89996, H96643, AA076642, AA079413, AA120823, AA120824, |
| | polynucleotides comprising a nucleotide sequence described by the | AA133102, AA128879, AA158349, AA158350, AA838312, |
| | general formula of a-b, where a is any integer between 1 to 1618 of | C00042, AA642274 |
| | SEQ ID NO:28, b is an integer of 15 to 1632, where both a and b | |
| | correspond to the positions of nucleotide residues shown in SEQ ID | |
| | NO:28, and where b is greater than or equal to a +14. | |
| 828482 | Preferably excluded from the present invention are one or more | R12256, T79977, T81576, T83389, T97268, T97379, R16708, |
| | polynucleotides comprising a nucleotide sequence described by the | R39343, R69161, R69275, H15410, H15466, H29577, H29661, |
| | general formula of a-b, where a is any integer between 1 to 2525 of | H50315, N34544, N47100, N62861, N67285, W24823, |
| | SEQ ID NO:29, b is an integer of 15 to 2539, where both a and b | AA232725, AA236518, AA657840, AA736793, W26725 |
| | correspond to the positions of nucleotide residues shown in SEQ ID | |
| | NO:29, and where b is greater than or equal to a +14. | |
| 828488 | Preferably excluded from the present invention are one or more | |
| | polynucleotides comprising a nucleotide sequence described by the | |
| | general formula of a-b, where a is any integer between 1 to 480 of | |
| | SEQ ID NO:30, b is an integer of 15 to 494, where both a and b | |
| | correspond to the positions of nucleotide residues shown in SEQ ID | |
| | NO:30, and where b is greater than or equal to a +14. | |
| 828491 | Preferably excluded from the present invention are one or more | |
| | polynucleotides comprising a nucleotide sequence described by the | |
| | general formula of a-b, where a is any integer between 1 to 1249 of | |
| | SEQ ID NO:31, b is an integer of 15 to 1263, where both a and b | |
| | correspond to the positions of nucleotide residues shown in SEQ ID | |
| | NO:31, and where b is greater than or equal to a +14. | |
| 828492 | Preferably excluded from the present invention are one or more | |
| | polynucleotides comprising a nucleotide sequence described by the | |
| | general formula of a-b, where a is any integer between 1 to 323 of | |
| | SEQ ID NO:32, b is an integer of 15 to 337, where both a and b | |
| | correspond to the positions of nucleotide residues shown in SEQ ID | |
| | NO:32, and where b is greater than or equal to a +14. | |
| 828494 | Preferably excluded from the present invention are one or more | T77590, R19349, H06686, N42827, N42891, N73270, W38326, |
| | polynucleotides comprising a nucleotide sequence described by the | AA180136, AA194183, AA235257, AA424380, AA902702, |
| | general formula of a-b, where a is any integer between 1 to 1728 of | AA939089, AA977206, AA988001, AA996359 |
| | SEQ ID NO:33, b is an integer of 15 to 1742, where both a and b | |
| | correspond to the positions of nucleotide residues shown in SEQ ID | |
| | NO:33, and where b is greater than or equal to a +14. | |
| 828496 | Preferably excluded from the present invention are one or more | H16641, 1181084, AA972362 |
| | polynucleotides comprising a nucleotide sequence described by the | |
| | general formula of a-b, where a is any integer between 1 to 1152 of | |
| | SEQ ID NO:34, b is an integer of 15 to 1166, where both a and b | |
| | correspond to the positions of nucleotide residues shown in SEQ ID | |
| | NO:34, and where b is greater than or equal to a +14. | |
| 828498 | Preferably excluded from the present invention are one or more | T39930, T98680, R89124, R89756, R91725, R91820, R92013, |
| | polynucleotides comprising a nucleotide sequence described by the | R92158, R94233, R94329, H59495, H61480, H62771, H62831, |
| | general formula of a-b, where a is any integer between 1 to 1035 of | H67085, H67621, H71835, H71836, H79855, H79856, N31924, |
| | SEQ ID NO:35, b is an integer of 15 to 1049, where both a and b | N42760, N55543, N72715, N76929, N79841, W46350, W46166, |
| | correspond to the positions of nucleotide residues shown in SEQ ID | H97319, AA730300, AA746151, AA887571, AA918492, |
| | NO:35, and where b is greater than or equal to a +14. | AA989417, AI001025, D79228, W38455, C15769 |
| 828504 | Preferably excluded from the present invention are one or more | |
| | polynucleotides comprising a nucleotide sequence described by the | |
| | general formula of a-b, where a is any integer between 1 to 475 of | |
| | SEQ ID NO:36, b is an integer of 15 to 489, where both a and b | |
| | correspond to the positions of nucleotide residues shown in SEQ ID | |
| | NO:36, and where b is greater than or equal to a +14. | |
| 828507 | Preferably excluded from the present invention are one or more | |
| | polynucleotides comprising a nucleotide sequence described by the | |
| | general formula of a-b, where a is any integer between I to 584 of | |
| | SEQ ID NO:37, b is an integer of 15 to 598, where both a and b | |
| | correspond to the positions of nucleotide residues shown in SEQ ID | |
| | NO:37, and where b is greater than or equal to a +14. | |
| 828512 | Preferably excluded from the present invention are one or more | N27463 |
| | polynucleotides comprising a nucleotide sequence described by the | |
| | general formula of a-b, where a is any integer between 1 to 748 of | |
| | SEQ ID NO:38, b is an integer of 15 to 762, where both a and b | |
| | correspond to the positions of nucleotide residues shown in SEQ ID | |
| | NO:38, and where b is greater than or equal to a +14. | |
| 828516 | Preferably excluded from the present invention are one or more | T56794, T56795, T84141, R02653, R20890, R24025, R33319, |
| | polynucleotides comprising a nucleotide sequence described by the | R33320, R34774, R67912, R69738, R77753, R77838, R81629, |
| | general formula of a-b, where a is any integer between 1 to 1944 of | H15449, H15508, H127402, H158932, H158979, H199151, N20262, |
| | SEQ ID NO:39, b is an integer of 15 to 1958, where both a and b | N24400, N25962, N29166, N34977, N35438, N50797, N55154, |
| | correspond to the positions of nucleotide residues shown in SEQ ID | W02966, W92783, W92882, AA007585, AA036747, AA036997, |
| | NO:39, and where b is greater than or equal to a +14. | AA074474, AA102125, AA100655, AA112751, AA113219, |
| | | AA113805, AA188790, AA541250, AA541763, AA558310, |
| | | AA559035, AA581570, AA587474, AA569332, AA687827, |
| | | AA715063, AA918342, AA936443, AA937851, AA947124, |
| | | AA954522, AA989224, AI017059, AI057158, AI088905, |
| | | AI094996, AI096728, U46434, C01531 |
| 828519 | Preferably excluded from the present invention are one or more | W79671 |
| | polynucleotides comprising a nucleotide sequence described by the | |
| | general formula of a-b, where a is any integer between 1 to 463 of | |
| | SEQ ID NO:40, b is an integer of 15 to 477, where both a and b | |
| | correspond to the positions of nucleotide residues shown in SEQ ID | |
| | NO:40, and where b is greater than or equal to a +14. | |
| 828521 | Preferably excluded from the present invention are one or more | |
| | polynucleotides comprising a nucleotide sequence described by the | |
| | general formula of a-b, where a is any integer between 1 to 846 of | |
| | SEQ ID NO:41, b is an integer of 15 to 860, where both a and b | |
| | correspond to the positions of nucleotide residues shown in SEQ ID | |
| | NO:41, and where b is greater than or equal to a +14, | |
| 828522 | Preferably excluded from the present invention are one or more | T54309, T63973, T64041, T89636, T90270, R62731, R63686, |
| | polynucleotides comprising a nucleotide sequence described by the | H98873, N25098, N36012, N38881, N44246, N67168, AA047726, |
| | general formula of a-b, where a is any integer between ito 1117 of | AA081019, AA120775, AA120774, AA128274, AA128571, |
| | SEQ ID NO:42, b is an integer of 15 to 1131, where both a and b | AA551864, AA767989, AA902693 |
| | correspond to the positions of nucleotide residues shown in SEQ ID | |
| | NO:42, and where b is greater than or equal to a +14. | |
| 828525 | Preferably excluded from the present invention are one or more | T48657, T48687, T48861, T49081, T49118, T53559, T58581, |
| | polynucleotides comprising a nucleotide sequence described by the | R23090, R26432, R26979, R27855, R32999, R34608, R64482, |
| | general formula of a-b, where a is any integer between Ito 1320 of | R64537, R66662, R67745, R69150, R70688, R77130, R81861, |
| | SEQ ID NO:43, b is an integer of 15 to 1334, where both a and b | R82246, R82815, H03531, N39770, N41593, N42044, N57142, |
| | correspond to the positions of nucleotide residues shown in SEQ ID | N94149, AA029208, AA149385, AA234086, N26326, N30247, |
| | NO:43, and where b is greater than or equal to a +14. | N30819, N32903, N39539, D78905, D79060, N63792, AA029209 |
| 828529 | Preferably excluded from the present invention are one or more | |
| | polynucleotides comprising a nucleotide sequence described by the | |
| | general formula of a-b, where a is any integer between 1 to 2337 of | |
| | SEQ ID NO:44, b is an integer of 15 to 2351, where both a and b | |
| | correspond to the positions of nucleotide residues shown in SEQ ID | |
| | NO:44, and where b is greater than or equal to a +14. | |
| 828530 | Preferably excluded from the present invention are one or more | T74290, T79269, R24408, R24409, R32342, R33507, R34284, |
| | polynucleotides comprising a nucleotide sequence described by the | R70908, H13795, H13794, N42196, AA013089, AA228469, |
| | general formula of a-b, where a is any integer between ito 1573 of | AA505953, AA508121, AA602662, AA631903, AA865676, |
| | SEQ ID NO:45, b is an integer of 15 to 1587, where both a and b | AA888323, AI032201, AA013090 |
| | correspond to the positions of nucleotide residues shown in SEQ ID | |
| | NO:45, and where b is greater than or equal to a +14. | |
| 828536 | Preferably excluded from the present invention are one or more | |
| | polynucleotides comprising a nucleotide sequence described by the | |
| | general formula of a-b, where a is any integer between 1 to 365 of | |
| | SEQ ID NO:46, b is an integer of 15 to 379, where both a and b | |
| | correspond to the positions of nucleotide residues shown in SEQ ID | |
| | NO:46, and where b is greater than or equal to a +14. | |
| 828537 | Preferably excluded from the present invention are one or more | |
| | polynucleotides comprising a nucleotide sequence described by the | |
| | general formula of a-b, where a is any integer between 1 to 1906 of | |
| | SEQ ID NO:47, b is an integer of 15 to 1920, where both a and b | |
| | correspond to the positions of nucleotide residues shown in SEQ ID | |
| | NO:47, and where b is greater than or equal to a +14. | |
| 828539 | Preferably excluded from the present invention are one or more | |
| | polynucleotides comprising a nucleotide sequence described by the | |
| | general formula of a-b, where a is any integer between 1 to 305 of | |
| | SEQ ID NO:48, b is an integer of 15 to 319, where both a and b | |
| | correspond to the positions of nucleotide residues shown in SEQ ID | |
| | NO:48, and where b is greater than or equal to a +14. | |
| 828540 | Preferably excluded from the present invention are one or more | |
| | polynucleotides comprising a nucleotide sequence described by the | |
| | general formula of a-b, where a is any integer between 1 to 264 of | |
| | SEQ ID NO:49, b is an integer of 15 to 278, where both a and b | |
| | correspond to the positions of nucleotide residues shown in SEQ ID | |
| | NO:49, and where b is greater than or equal to a +14. | |
| 828542 | Preferably excluded from the present invention are one or more | |
| | polynucleotides comprising a nucleotide sequence described by the | |
| | general formula of a-b, where a is any integer between 1 to 638 of | |
| | SEQ ID NO:50, b is an integer of 15 to 652, where both a and b | |
| | correspond to the positions of nucleotide residues shown in SEQ ID | |
| | NO:50, and where b is greater than or equal to a +14. | |
| 828543 | Preferably excluded from the present invention are one or more | |
| | polynucleotides comprising a nucleotide sequence described by the | |
| | general formula of a-b, where a is any integer between 1 to 929 of | |
| | SEQ ID NO:51, b is an integer of 15 to 943, where both a and b | |
| | correspond to the positions of nucleotide residues shown in SEQ ID | |
| | NO:51, and where b is greater than or equal to a +14. | |
| 828544 | Preferably excluded from the present invention are one or more | |
| | polynucleotides comprising a nucleotide sequence described by the | |
| | general formula of a-b, where a is any integer between 1 to 818 of | |
| | SEQ ID NO:52, b is an integer of 15 to 832, where both a and b | |
| | correspond to the positions of nucleotide residues shown in SEQ ID | |
| | NO:52, and where b is greater than or equal to a +14. | |
| 828546 | Preferably excluded from the present invention are one or more | H25827, H45313, W77774, AA587295, AA595924, AA603051, |
| | polynucleotides comprising a nucleotide sequence described by the | C00427 |
| | general formula of a-b, where a is any integer between 1 to 1540 of | |
| | SEQ ID NO:53, b is an integer of 15 to 1554, where both a and b | |
| | correspond to the positions of nucleotide residues shown in SEQ ID | |
| | NO:53, and where b is greater than or equal to a +14. | |
| 828550 | Preferably excluded from the present invention are one or more | |
| | polynucleotides comprising a nucleotide sequence described by the | |
| | general formula of a-b, where a is any integer between 1 to 267 of | |
| | SEQ ID NO:54, b is an integer of 15 to 281, where both a and b | |
| | correspond to the positions of nucleotide residues shown in SEQ ID | |
| | NO:54, and where b is greater than or equal to a +14. | |
| 828551 | Preferably excluded from the present invention are one or more | AA224996, AA225045, AA229587, AA524970, AA528287, |
| | polynucleotides comprising a nucleotide sequence described by the | AA569633, AA577923 |
| | general formula of a-b, where a is any integer between 1 to 793 of | |
| | SEQ ID NO:55, b is an integer of 15 to 807, where both a and b | |
| | correspond to the positions of nucleotide residues shown in SEQ ID | |
| | NO:55, and where b is greater than or equal to a +14. | |
| 828553 | Preferably excluded from the present invention are one or more | |
| | polynucleotides comprising a nucleotide sequence described by the | |
| | general formula of a-b, where a is any integer between 1 to 642 of | |
| | SEQ ID NO:56, b is an integer of 15 to 656, where both a and b | |
| | correspond to the positions of nucleotide residues shown in SEQ ID | |
| | NO:56, and where b is greater than or equal to a +14. | |
| 828557 | Preferably excluded from the present invention are one or more | |
| | polynucleotides comprising a nucleotide sequence described by the | |
| | general formula of a-b, where a is any integer between 1 to 780 of | |
| | SEQ ID NO:57, b is an integer of 15 to 794, where both a and b | |
| | correspond to the positions of nucleotide residues shown in SEQ ID | |
| | NO:57, and where b is greater than or equal to a +14. | |
| 828560 | Preferably excluded from the present invention are one or more | R77295, R77355, N50880, AA228477, AA229199, AA229332, |
| | polynucleotides comprising a nucleotide sequence described by the | AA229430, AA229342, AA508222, AA508881, AA508713, |
| | general formula of a-b, where a is any integer between 1 to 1141 of | AA522664, AA525054, AA531563, AA564505, AA627496, |
| | SEQ ID NO:58, b is an integer of 15 to 1155, where both a and b | AA569813, AA908306 |
| | correspond to the positions of nucleotide residues shown in SEQ ID | |
| | NO:58, and where b is greater than or equal to a +14. | |
| 828561 | Preferably excluded from the present invention are one or more | |
| | polynucleotides comprising a nucleotide sequence described by the | |
| | general formula of a-b, where a is any integer between 1 to 478 of | |
| | SEQ ID NO:59, b is an integer of 15 to 492, where both a and b | |
| | correspond to the positions of nucleotide residues shown in SEQ ID | |
| | NO:59, and where b is greater than or equal to a +14. | |
| 828565 | Preferably excluded from the present invention are one or more | |
| | polynucleotides comprising a nucleotide sequence described by the | |
| | general formula of a-b, where a is any integer between 1 to 1603 of | |
| | SEQ ID NO:60, b is an integer of 15 to 1617, where both a and b | |
| | correspond to the positions of nucleotide residues shown in SEQ ID | |
| | NO:60, and where b is greater than or equal to a +14. | |
| 828566 | Preferably excluded from the present invention are one or more | T74741, R89314, H66527, H66526, H67472, H67473, H68173, |
| | polynucleotides comprising a nucleotide sequence described by the | H68172, H96621, H96622, N27775, N28518, N33857, N66931, |
| | general formula of a-b, where a is any integer between ito 1639 of | AA149826, AA151993, AA152072, AA152078, AA188743 |
| | SEQ ID NO:61, b is an integer of 15 to 1653, where both a and b | |
| | correspond to the positions of nucleotide residues shown in SEQ ID | |
| | NO:61, and where b is greater than or equal to a +14. | |
| 828567 | Preferably excluded from the present invention are one or more | |
| | polynucleotides comprising a nucleotide sequence described by the | |
| | general formula of a-b, where a is any integer between 1 to 426 of | |
| | SEQ ID NO:62, b is an integer of 15 to 440, where both a and b | |
| | correspond to the positions of nucleotide residues shown in SEQ ID | |
| | NO:62, and where b is greater than or equal to a +14. | |
| 828568 | Preferably excluded from the present invention are one or more | R01283, R62995, R63052, R97762, R97763, AA044146, |
| | polynucleotides comprising a nucleotide sequence described by the | AA044262, AA150771, AA429074, AA282254, AA282728, |
| | general formula of a-b, where a is any integer between 1 to 1048 of | AA468569, AA586526, AA622172, AA631182, AA631273, |
| | SEQ ID NO:63, b is an integer of 15 to 1062, where both a and b | AA809910, AA811682 |
| | correspond to the positions of nucleotide residues shown in SEQ ID | |
| | NO:63, and where b is greater than or equal to a +14. | |
| 828569 | Preferably excluded from the present invention are one or more | |
| | polynucleotides comprising a nucleotide sequence described by the | |
| | general formula of a-b, where a is any integer between 1 to 408 of | |
| | SEQ ID NO:64, b is an integer of 15 to 422, where both a and b | |
| | correspond to the positions of nucleotide residues shown in SEQ ID | |
| | NO:64, and where b is greater than or equal to a +14. | |
| 828570 | Preferably excluded from the present invention are one or more | H77440 |
| | polynucleotides comprising a nucleotide sequence described by the | |
| | general formula of a-b, where a is any integer between 1 to 695 of | |
| | SEQ ID NO:65, b is an integer of 15 to 709, where both a and b | |
| | correspond to the positions of nucleotide residues shown in SEQ ID | |
| | NO:65, and where b is greater than or equal to a +14. | |
| 828571 | Preferably excluded from the present invention are one or more | N27429, N34713, N51144, AA033703, AA033704, AA046488, |
| | polynucleotides comprising a nucleotide sequence described by the | AA046700, AA180131, AA514866, AA515411, AA527426, |
| | general formula of a-b, where a is any integer between 1 to 1288 of | AA554163, AA745008, AA805885, AA862045, AA953025, |
| | SEQ ID NO:66, b is an integer of 15 to 1302, where both a and b | AI075070 |
| | correspond to the positions of nucleotide residues shown in SEQ ID | |
| | NO:66, and where b is greater than or equal to a +14. | |
| 828574 | Preferably excluded from the present invention are one or more | T92929, T93045, T92007, T92093, T98007, R28667, N79460, |
| | polynucleotides comprising a nucleotide sequence described by the | AA614258, AA741201, AA847513, AI083735 |
| | general formula of a-b, where a is any integer between 1 to 1032 of | |
| | SEQ ID NO:67, b is an integer of 15 to 1046, where both a and b | |
| | correspond to the positions of nucleotide residues shown in SEQ ID | |
| | NO:67, and where b is greater than or equal to a +14. | |
| 828575 | Preferably excluded from the present invention are one or more | AA837738 |
| | polynucleotides comprising a nucleotide sequence described by the | |
| | general formula of a-b, where a is any integer between 1 to 487 of | |
| | SEQ ID NO:68, b is an integer of 15 to 501, where both a and b | |
| | correspond to the positions of nucleotide residues shown in SEQ ID | |
| | NO:68, and where b is greater than or equal to a +14. | |
| 828577 | Preferably excluded from the present invention are one or more | AA169882, AA169883 |
| | polynucleotides comprising a nucleotide sequence described by the | |
| | general formula of a-b, where a is any integer between 1 to 567 of | |
| | SEQ ID NO:69, b is an integer of 15 to 581, where both a and b | |
| | correspond to the positions of nucleotide residues shown in SEQ ID | |
| | NO:69, and where b is greater than or equal to a +14. | |
| 828578 | Preferably excluded from the present invention are one or more | T39452, T46945, T47319, T53621, T53622, T61271, T61323, |
| | polynucleotides comprising a nucleotide sequence described by the | R21194, R22811, R24705, R25199, R50467, R50468, R53758, |
| | general formula of a-b, where a is any integer between 1 to 1062 of | R53759, R63087, R63131, R63969, R64075, R70570, R77117, |
| | SEQ ID NO:70, b is an integer of 15 to 1076, where both a and b | R77118, R80611, R80612, H00653, H00742, H02619, H02725, |
| | correspond to the positions of nucleotide residues shown in SEQ ID | N32242, N57336, N69947, N80785, N98328, N98569, W15554, |
| | NO:70, and where b is greater than or equal to a +14. | AA029021, AA029143, AA037587, AA131825, AA131992, |
| | | AA229266, AA507524, AA533307, AA533431, AA534110, |
| | | AA534166, AA534281, AA535170, AA586608, AA593596, |
| | | AA838623, AA885780, AA936945, AA642546 |
| 828580 | Preferably excluded from the present invention are one or more | |
| | polynucleotides comprising a nucleotide sequence described by the | |
| | general formula of a-b, where a is any integer between 1 to 362 of | |
| | SEQ ID NO:71, b is an integer of 15 to 376, where both a and b | |
| | correspond to the positions of nucleotide residues shown in SEQ ID | |
| | NO:71, and where b is greater than or equal to a +14. | |
| 828581 | Preferably excluded from the present invention are one or more | AA507628 |
| | polynucleotides comprising a nucleotide sequence described by the | |
| | general formula of a-b, where a is any integer between 1 to 360 of | |
| | SEQ ID NO:72, b is an integer of 15 to 374, where both a and b | |
| | correspond to the positions of nucleotide residues shown in SEQ ID | |
| | NO:72, and where b is greater than or equal to a +14. | |
| 828583 | Preferably excluded from the present invention are one or more | |
| | polynucleotides comprising a nucleotide sequence described by the | |
| | general formula of a-b, where a is any integer between 1 to 405 of | |
| | SEQ ID NO:73, b is an integer of 15 to 419, where both a and b | |
| | correspond to the positions of nucleotide residues shown in SEQ ID | |
| | NO:73, and where b is greater than or equal to a +14. | |
| 828585 | Preferably excluded from the present invention are one or more | AA234220 |
| | polynucleotides comprising a nucleotide sequence described by the | |
| | general formula of a-b, where a is any integer between 1 to 272 of | |
| | SEQ ID NO:74, b is an integer of 15 to 286, where both a and b | |
| | correspond to the positions of nucleotide residues shown in SEQ ID | |
| | NO:74, and where b is greater than or equal to a +14. | |
| 828587 | Preferably excluded from the present invention are one or more | |
| | polynucleotides comprising a nucleotide sequence described by the | |
| | general formula of a-b, where a is any integer between 1 to 619 of | |
| | SEQ ID NO:75, b is an integer of 15 to 633, where both a and b | |
| | correspond to the positions of nucleotide residues shown in SEQ ID | |
| | NO:75, and where b is greater than or equal to a +14. | |
| 828590 | Preferably excluded from the present invention are one or more | |
| | polynucleotides comprising a nucleotide sequence described by the | |
| | general formula of a-b, where a is any integer between 1 to 242 of | |
| | SEQ ID NO:76, b is an integer of 15 to 256, where both a and b | |
| | correspond to the positions of nucleotide residues shown in SEQ ID | |
| | NO:76, and where b is greater than or equal to a +14. | |
| 828592 | Preferably excluded from the present invention are one or more | R52221, R54548, R97331, H57211, H55375, H55650 |
| | polynucleotides comprising a nucleotide sequence described by the | |
| | general formula of a-b, where a is any integer between 1 to 680 of | |
| | SEQ ID NO:77, b is an integer of 15 to 694, where both a and b | |
| | correspond to the positions of nucleotide residues shown in SEQ ID | |
| | NO:77, and where b is greater than or equal to a +14. | |
| 828593 | Preferably excluded from the present invention are one or more | T57629, T58982, R19824, R45052, R45052, R55638, R59495, |
| | polynucleotides comprising a nucleotide sequence described by the | H18527, H19193, H128411, H39750, H62246, H62335, H91342, |
| | general formula of a-b, where a is any integer between 1 to 2548 of | N62586, N63264, N80359, W81015, W94481, W94746, |
| | SEQ ID NO:78, b is an integer of 15 to 2562, where both a and b | AA011589, AA029848, AA028978, AA043902, AA114931, |
| | correspond to the positions of nucleotide residues shown in SEQ ID | AA114930, AA191597, AA232906, AA233035, AA258137, |
| | NO:78, and where b is greater than or equal to a +14. | AA287367, AA287505, AA506450, AA525766, AA526128, |
| | | AA548114, AA592904, AA808705, AA837733, AA876630, |
| | | AA908724, N90333, AA007166 |
| 828594 | Preferably excluded from the present invention are one or more | R06875, R06876, 1189673, AA036961, AA150107, AA150515, |
| | polynucleotides comprising a nucleotide sequence described by the | AA983641 |
| | general formula of a-b, where a is any integer between 1 to 1596 of | |
| | SEQ ID NO:79, b is an integer of 15 to 1610, where both a and b | |
| | correspond to the positions of nucleotide residues shown in SEQ ID | |
| | NO:79, and where b is greater than or equal to a +14. | |
| 828596 | Preferably excluded from the present invention are one or more | R09863, T84746, T98848, W01274, W48629, AA082189, |
| | polynucleotides comprising a nucleotide sequence described by the | AA426550, C04056 |
| | general formula of a-b, where a is any integer between 1 to 1034 of | |
| | SEQ ID NO:80, b is an integer of 15 to 1048, where both a and b | |
| | correspond to the positions of nucleotide residues shown in SEQ ID | |
| | NO:80, and where b is greater than or equal to a +14. | |
| 828597 | Preferably excluded from the present invention are one or more | R41797, R41797, H61049, N58312, N79783, W07281, W23730, |
| | polynucleotides comprising a nucleotide sequence described by the | W23738, W35330, W35337, AA235295, AA935231, AA995710, |
| | general formula of a-b, where a is any integer between 1 to 1122 of | AI017376, AI088874, AI096890, W27549 |
| | SEQ ID NO:81, b is an integer of 15 to 1136, where both a and b | |
| | correspond to the positions of nucleotide residues shown in SEQ ID | |
| | NO:81, and where b is greater than or equal to a +14. | |
| 828598 | Preferably excluded from the present invention are one or more | |
| | polynucleotides comprising a nucleotide sequence described by the | |
| | general formula of a-b, where a is any integer between 1 to 283 of | |
| | SEQ ID NO:82, b is an integer of 15 to 297, where both a and b | |
| | correspond to the positions of nucleotide residues shown in SEQ ID | |
| | NO:82, and where b is greater than or equal to a +14. | |
| 828601 | Preferably excluded from the present invention are one or more | |
| | polynucleotides comprising a nucleotide sequence described by the | |
| | general formula of a-b, where a is any integer between 1 to 2136 of | |
| | SEQ ID NO:83, b is an integer of 15 to 2150, where both a and b | |
| | correspond to the positions of nucleotide residues shown in SEQ ID | |
| | NO:83, and where b is greater than or equal to a +14. | |
| 828605 | Preferably excluded from the present invention are one or more | |
| | polynucleotides comprising a nucleotide sequence described by the | |
| | general formula of a-b, where a is any integer between 1 to 587 of | |
| | SEQ ID NO:84, b is an integer of 15 to 601, where both a and b | |
| | correspond to the positions of nucleotide residues shown in SEQ ID | |
| | NO:84, and where b is greater than or equal to a +14. | |
| 828608 | Preferably excluded from the present invention are one or more | AA244003, AA244034, AA506324 |
| | polynucleotides comprising a nucleotide sequence described by the | |
| | general formula of a-b, where a is any integer between 1 to 520 of | |
| | SEQ ID NO:85, b is an integer of 15 to 534, where both a and b | |
| | correspond to the positions of nucleotide residues shown in SEQ ID | |
| | NO:85, and where b is greater than or equal to a +14. | |
| 828609 | Preferably excluded from the present invention are one or more | N48056, N52932, N53254, N64840, N75691, AI050871 |
| | polynucleotides comprising a nucleotide sequence described by the | |
| | general formula of a-b, where a is any integer between 1 to 1023 of | |
| | SEQ ID NO:86, b is an integer of 15 to 1037, where both a and b | |
| | correspond to the positions of nucleotide residues shown in SEQ ID | |
| | NO:86, and where b is greater than or equal to a +14. | |
| 828610 | Preferably excluded from the present invention are one or more | AA177029, AA177023, AA176984, AA177153, AA216404, |
| | polynucleotides comprising a nucleotide sequence described by the | AA224959, AA225025, AA225109, AA225143, AA225206, |
| | general formula of a-b, where a is any integer between ito 583 of | AA225152, AA225228, AA225308, AA225322, AA225213, |
| | SEQ ID NO:87, b is an integer of 15 to 597, where both a and b | AA225409, AA225879, AA225880, AA225963, AA225974, |
| | correspond to the positions of nucleotide residues shown in SEQ ID | AA226101, AA226227, AA226240, AA226384, AA226459, |
| | NO:87, and where b is greater than or equal to a +14. | AA226556, AA226623, AA226632, AA226680, AA229222, |
| | | AA229223, AA229482, AA229756, AA229964, AA244017, |
| | | AA244091, AA244178, AA244052, AA244362, AA244452, |
| | | AA397457, AA420631, AA420632, AA420633, AA420826, |
| | | AA469131, AA469154, AA469201, AA469209, AA469226, |
| | | AA469293, AA469373, AA470501, AA470548, AA492204, |
| | | AA492255, AA492295, AA492311, AA492312, AA492327, |
| | | AA492329, AA492334, AA492382, AA492389, AA492411, |
| | | AA492438, AA492445, AA492451, AA494242, AA494243, |
| | | AA494246, AA493268, AA493332, AA493445, AA502071, |
| | | AA502154, AA502180, AA502191, AA502200, AA502978, |
| | | AA502981, AA503115, AA503349, AA503429, AA503609, |
| | | AA503666, AA503677, AA503682, AA503909, AA503926, |
| | | AA504051, AA504066, AA506197, AA506319, AA506330, |
| | | AA506475, AA506731, AA506804, AA506914, AA507128, |
| | | AA507215, AA507217, AA507281, AA507287, AA507305, |
| | | AA507373, AA507510, AA507545, AA507615, AA507633, |
| | | AA507659, AA507664, AA507669, AA507679, AA507685, |
| | | AA507759, AA507769, AA507778, AA507785, AA507789, |
| | | AA507968, AA507983, AA507996, AA507995, AA508013, |
| | | AA508078, AA508096, AA508112, AA508128, AA508144, |
| | | AA508348, AA508360, AA508636, AA513240, AA514804, |
| | | AA514915, AA516492, AA516500, AA522599, AA524675, |
| | | AA524914, AA524998, AA525091, AA526491, AA526493, |
| | | AA527728, AA527825, AA528273, AA530882, AA530906, |
| | | AA530942, AA530954, AA531208, AA531341, AA531361, |
| | | AA531381, AA531498, AA532578, AA532712, AA532960, |
| | | AA533031, AA533053, AA533162, AA533961, AA534135, |
| | | AA535497, AA535744, AA541576, AA541642, AA548220, |
| | | AA548400, AA551463, AA551698, AA551727, AA551737, |
| | | AA552827, AA552829, AA557784, AA557804, AA558634, |
| | | AA564543, AA564966, AA565164, AA588853, AA588270, |
| | | AA587824, AA588630, AA593049, AA593065, AA594830, |
| | | AA594923, AA595627, AA603351, AA603362, AA603437, |
| | | AA603827, AA603877, AA603879, AA630927, AA635332, |
| | | AA635394, AA635542, AA635549, AA635909, AA636004, |
| | | AA639312, AA639995, AA640184, AA640298, AA640342, |
| | | AA569556, AA570614, AA572857, AA574208, AA574209, |
| | | AA574212, AA574273, AA580026, AA578701, AA578799, |
| | | AA578900, AA579004, AA579008, AA579351, AA568108, |
| | | AA568415, AA654920, AA654956, AA657393, AA657432, |
| | | AA657479, AA657506, AA657531, AA657541, AA657686, |
| | | AA657800, AA657938, AA658414, AA658873, AA659224, |
| | | AA659592, AA659778, AA661727, AA662090, AA662125, |
| | | AA662301, AA687536, AA687632, AA715325, AA807843, |
| | | AA809523, AA809593, AA640904, AA640929, AA642080, |
| | | AA642520 |
| 828617 | Preferably excluded from the present invention are one or more | |
| | polynucleotides comprising a nucleotide sequence described by the | |
| | general formula of a-b, where a is any integer between 1 to 460 of | |
| | SEQ ID NO:88, b is an integer of 15 to 474, where both a and b | |
| | correspond to the positions of nucleotide residues shown in SEQ ID | |
| | NO:88, and where b is greater than or equal to a +14. | |
| 828620 | Preferably excluded from the present invention are one or more | AA228288, AA492280, AA507777, AA508355, AA527737, |
| | polynucleotides comprising a nucleotide sequence described by the | AA527805, AA559165, AA559352, AA564484, AA602957, |
| | general formula of a-b, where a is any integer between ito 1523 of | AA659719, AA642055 |
| | SEQ ID NO:89, b is an integer of 15 to 1537, where both a and b | |
| | correspond to the positions of nucleotide residues shown in SEQ ID | |
| | NO:89, and where b is greater than or equal to a +14. | |
| 828621 | Preferably excluded from the present invention are one or more | |
| | polynucleotides comprising a nucleotide sequence described by the | |
| | general formula of a-b, where a is any integer between 1 to 290 of | |
| | SEQ ID NO:90, b is an integer of 15 to 304, where both a and b | |
| | correspond to the positions of nucleotide residues shown in SEQ ID | |
| | NO:90, and where b is greater than or equal to a +14. | |
| 828622 | Preferably excluded from the present invention are one or more | AA570443 |
| | polynucleotides comprising a nucleotide sequence described by the | |
| | general formula of a-b, where a is any integer between 1 to 355 of | |
| | SEQ ID NO:91, b is an integer of 15 to 369, where both a and b | |
| | correspond to the positions of nucleotide residues shown in SEQ ID | |
| | NO:91, and where b is greater than or equal to a +14. | |
| 828623 | Preferably excluded from the present invention are one or more | |
| | polynucleotides comprising a nucleotide sequence described by the | |
| | general formula of a-b, where a is any integer between 1 to 301 of | |
| | SEQ ID NO:92, b is an integer of 15 to 315, where both a and b | |
| | correspond to the positions of nucleotide residues shown in SEQ ID | |
| | NO:92, and where b is greater than or equal to a +14. | |
| 828625 | Preferably excluded from the present invention are one or more | |
| | polynucleotides comprising a nucleotide sequence described by the | |
| | general formula of a-b, where a is any integer between 1 to 687 of | |
| | SEQ ID NO:93, b is an integer of 15 to 701, where both a and b | |
| | correspond to the positions of nucleotide residues shown in SEQ ID | |
| | NO:93, and where b is greater than or equal to a +14. | |
| 828632 | Preferably excluded from the present invention are one or more | |
| | polynucleotides comprising a nucleotide sequence described by the | |
| | general formula of a-b, where a is any integer between 1 to 445 of | |
| | SEQ ID NO:94, b is an integer of 15 to 459, where both a and b | |
| | correspond to the positions of nucleotide residues shown in SEQ ID | |
| | NO:94, and where b is greater than or equal to a +14. | |
| 828635 | Preferably excluded from the present invention are one or more | R13230, R19016, R35012, R40312, R44087, R46776, R49399, |
| | polynucleotides comprising a nucleotide sequence described by the | R44087, R40312, R49399, H22883, H24275, H71951, N73720, |
| | general formula of a-b, where a is any integer between Ito 2575 of | W03891, W95360, W95359, AA055316, AA055317, AA135153, |
| | SEQ ID NO:95, b is an integer of 15 to 2589, where both a and b | AA135291, AA195210, AA195427, AA236624, AA237000, |
| | correspond to the positions of nucleotide residues shown in SEQ ID | AA548249, AA553712, AA595319, AA770603, AA947028, |
| | NO:95, and where b is greater than or equal to a +14. | D78699 |
| 828637 | Preferably excluded from the present invention are one or more | |
| | polynucleotides comprising a nucleotide sequence described by the | |
| | general formula of a-b, where a is any integer between 1 to 443 of | |
| | SEQ ID NO:96, b is an integer of 15 to 457, where both a and b | |
| | correspond to the positions of nucleotide residues shown in SEQ ID | |
| | NO:96, and where b is greater than or equal to a +14. | |
| 828639 | Preferably excluded from the present invention are one or more | |
| | polynucleotides comprising a nucleotide sequence described by the | |
| | general formula of a-b, where a is any integer between 1 to 502 of | |
| | SEQ ID NO:97, b is an integer of 15 to 516, where both a and b | |
| | correspond to the positions of nucleotide residues shown in SEQ ID | |
| | NO:97, and where b is greater than or equal to a +14. | |
| 828645 | Preferably excluded from the present invention are one or more | |
| | polynucleotides comprising a nucleotide sequence described by the | |
| | general formula of a-b, where a is any integer between 1 to 300 of | |
| | SEQ ID NO:98, b is an integer of 15 to 314, where both a and b | |
| | correspond to the positions of nucleotide residues shown in SEQ ID | |
| | NO:98, and where b is greater than or equal to a +14. | |
| 828648 | Preferably excluded from the present invention are one or more | |
| | polynucleotides comprising a nucleotide sequence described by the | |
| | general formula of a-b, where a is any integer between 1 to 665 of | |
| | SEQ ID NO:99, b is an integer of 15 to 679, where both a and b | |
| | correspond to the positions of nucleotide residues shown in SEQ ID | |
| | NO:99, and where b is greater than or equal to a +14. | |
| 828649 | Preferably excluded from the present invention are one or more | |
| | polynucleotides comprising a nucleotide sequence described by the | |
| | general formula of a-b, where a is any integer between 1 to 585 of | |
| | SEQ ID NO:100, b is an integer of 15 to 599, where both a and b | |
| | correspond to the positions of nucleotide residues shown in SEQ ID | |
| | NO:100, and where b is greater than or equal to a +14. | |
| 828651 | Preferably excluded from the present invention are one or more | |
| | polynucleotides comprising a nucleotide sequence described by the | |
| | general formula of a-b, where a is any integer between 1 to 1175 of | |
| | SEQ ID NO:101, b is an integer of 15 to 1189, where both a and b | |
| | correspond to the positions of nucleotide residues shown in SEQ ID | |
| | NO:101, and where b is greater than or equal to a +14. | |
| 828652 | Preferably excluded from the present invention are one or more | |
| | polynucleotides comprising a nucleotide sequence described by the | |
| | general formula of a-b, where a is any integer between 1 to 237 of | |
| | SEQ ID NO:102, b is an integer of 15 to 251, where both a and b | |
| | correspond to the positions of nucleotide residues shown in SEQ ID | |
| | NO:102, and where b is greater than or equal to a +14. | |
| 828655 | Preferably excluded from the present invention are one or more | |
| | polynucleotides comprising a nucleotide sequence described by the | |
| | general formula of a-b, where a is any integer between 1 to 444 of | |
| | SEQ ID NO:103, b is an integer of 15 to 458, where both a and b | |
| | correspond to the positions of nucleotide residues shown in SEQ ID | |
| | NO:103, and where b is greater than or equal to a +14. | |
| 828657 | Preferably excluded from the present invention are one or more | |
| | polynucleotides comprising a nucleotide sequence described by the | |
| | general formula of a-b, where a is any integer between 1 to 425 of | |
| | SEQ ID NO:104, b is an integer of 15 to 439, where both a and b | |
| | correspond to the positions of nucleotide residues shown in SEQ ID | |
| | NO:104, and where b is greater than or equal to a +14. | |
| 828660 | Preferably excluded from the present invention are one or more | |
| | polynucleotides comprising a nucleotide sequence described by the | |
| | general formula of a-b, where a is any integer between 1 to 219 of | |
| | SEQ ID NO:105, b is an integer of 15 to 233, where both a and b | |
| | correspond to the positions of nucleotide residues shown in SEQ ID | |
| | NO:105, and where b is greater than or equal to a +14. | |
| 828663 | Preferably excluded from the present invention are one or more | |
| | polynucleotides comprising a nucleotide sequence described by the | |
| | general formula of a-b, where a is any integer between 1 to 690 of | |
| | SEQ ID NO:106, b is an integer of 15 to 704, where both a and b | |
| | correspond to the positions of nucleotide residues shown in SEQ ID | |
| | NO:106, and where b is greater than or equal to a +14. | |
| 828666 | Preferably excluded from the present invention are one or more | |
| | polynucleotides comprising a nucleotide sequence described by the | |
| | general formula of a-b, where a is any integer between 1 to 431 of | |
| | SEQ ID NO:107, b is an integer of 15 to 445, where both a and b | |
| | correspond to the positions of nucleotide residues shown in SEQ ID | |
| | NO:107, and where b is greater than or equal to a +14. | |
| 828668 | Preferably excluded from the present invention are one or more | |
| | polynucleotides comprising a nucleotide sequence described by the | |
| | general formula of a-b, where a is any integer between 1 to 578 of | |
| | SEQ ID NO:108, b is an integer of 15 to 592, where both a and b | |
| | correspond to the positions of nucleotide residues shown in SEQ ID | |
| | NO:108, and where b is greater than or equal to a +14. | |
| 828669 | Preferably excluded from the present invention are one or more | |
| | polynucleotides comprising a nucleotide sequence described by the | |
| | general formula of a-b, where a is any integer between 1 to 367 of | |
| | SEQ ID NO:109, b is an integer of 15 to 381, where both a and b | |
| | correspond to the positions of nucleotide residues shown in SEQ ID | |
| | NO:109, and where b is greater than or equal to a +14. | |
| 828670 | Preferably excluded from the present invention are one or more | W38772 |
| | polynucleotides comprising a nucleotide sequence described by the | |
| | general formula of a-b, where a is any integer between 1 to 337 of | |
| | SEQ ID NO:110, b is an integer of 15 to 351, where both a and b | |
| | correspond to the positions of nucleotide residues shown in SEQ ID | |
| | NO:110, and where b is greater than or equal to a +14. | |
| 828671 | Preferably excluded from the present invention are one or more | |
| | polynucleotides comprising a nucleotide sequence described by the | |
| | general formula of a-b, where a is any integer between 1 to 1569 of | |
| | SEQ ID NO:111, b is an integer of 15 to 1583, where both a and b | |
| | correspond to the positions of nucleotide residues shown in SEQ ID | |
| | NO:111, and where b is greater than or equal to a +14. | |
| 828672 | Preferably excluded from the present invention are one or more | |
| | polynucleotides comprising a nucleotide sequence described by the | |
| | general formula of a-b, where a is any integer between 1 to 417 of | |
| | SEQ ID NO:112, b is an integer of 15 to 431, where both a and b | |
| | correspond to the positions of nucleotide residues shown in SEQ ID | |
| | NO:112, and where b is greater than or equal to a +14. | |
| 828675 | Preferably excluded from the present invention are one or more | T56042, T56076, T39529, T39565, R20801, R20914, R99174, |
| | polynucleotides comprising a nucleotide sequence described by the | W76346, AA070283, AA100602, AA186719, AA192887, |
| | general formula of a-b, where a is any integer between Ito 2828 of | AA258594, AA258623, AA262429, AA458551, AA425795, |
| | SEQ ID NO:113, b is an integer of 15 to 2842, where both a and b AA426147, AA426000, AA428422, AA428672, AA429274, | |
| | correspond to the positions of nucleotide residues shown in SEQ ID | AA429569, AA429700, AA280808, AA280860, AA583152, |
| | NO:113, and where b is greater than or equal to a +14. | AA604621, AA573460, AA737552, AA745643, AA809317, |
| | | AA811436, AA831842, AA832058, AA837490, AA847879, |
| | | AI089925, AA070162 |
| 828677 | Preferably excluded from the present invention are one or more | |
| | polynucleotides comprising a nucleotide sequence described by the | |
| | general formula of a-b, where a is any integer between 1 to 254 of | |
| | SEQ ID NO:114, b is an integer of 15 to 268, where both a and b | |
| | correspond to the positions of nucleotide residues shown in SEQ ID | |
| | NO:114, and where b is greater than or equal to a +14. | |
| 828678 | Preferably excluded from the present invention are one or more | |
| | polynucleotides comprising a nucleotide sequence described by the | |
| | general formula of a-b, where a is any integer between 1 to 786 of | |
| | SEQ ID NO:115, b is an integer of 15 to 800, where both a and b | |
| | correspond to the positions of nucleotide residues shown in SEQ ID | |
| | NO:115, and where b is greater than or equal to a +14. | |
| 828679 | Preferably excluded from the present invention are one or more | |
| | polynucleotides comprising a nucleotide sequence described by the | |
| | general formula of a-b, where a is any integer between 1 to 632 of | |
| | SEQ ID NO:116, b is an integer of 15 to 646, where both a and b | |
| | correspond to the positions of nucleotide residues shown in SEQ ID | |
| | NO:116, and where b is greater than or equal to a +14. | |
| 828680 | Preferably excluded from the present invention are one or more | N64514, N70990, W01522, AA025937, AA025996, AA210760, |
| | polynucleotides comprising a nucleotide sequence described by the | AA215724, AA761682, AA768989, AA911839 |
| | general formula of a-b, where a is any integer between 1 to 1520 of | |
| | SEQ ID NO:117, b is an integer of 15 to 1534, where both a and b | |
| | correspond to the positions of nucleotide residues shown in SEQ ID | |
| | NO:117, and where b is greater than or equal to a +14. | |
| 828681 | Preferably excluded from the present invention are one or more | |
| | polynucleotides comprising a nucleotide sequence described by the | |
| | general formula of a-b, where a is any integer between 1 to 325 of | |
| | SEQ ID NO:118, b is an integer of 15 to 339, where both a and b | |
| | correspond to the positions of nucleotide residues shown in SEQ ID | |
| | NO:118, and where b is greater than or equal to a +14. | |
| 828682 | Preferably excluded from the present invention are one or more | |
| | polynucleotides comprising a nucleotide sequence described by the | |
| | general formula of a-b, where a is any integer between 1 to 651 of | |
| | SEQ ID NO:119, b is an integer of 15 to 665, where both a and b | |
| | correspond to the positions of nucleotide residues shown in SEQ ID | |
| | NO:119, and where b is greater than or equal to a +14. | |
| 828683 | Preferably excluded from the present invention are one or more | |
| | polynucleotides comprising a nucleotide sequence described by the | |
| | general formula of a-b, where a is any integer between 1 to 608 of | |
| | SEQ ID NO:120, b is an integer of 15 to 622, where both a and b | |
| | correspond to the positions of nucleotide residues shown in SEQ ID | |
| | NO:120, and where b is greater than or equal to a +14. | |
| 828686 | Preferably excluded from the present invention are one or more | |
| | polynucleotides comprising a nucleotide sequence described by the | |
| | general formula of a-b, where a is any integer between 1 to 875 of | |
| | SEQ ID NO:121, b is an integer of 15 to 889, where both a and b | |
| | correspond to the positions of nucleotide residues shown in SEQ ID | |
| | NO:121, and where b is greater than or equal to a +14. | |
| 828687 | Preferably excluded from the present invention are one or more | |
| | polynucleotides comprising a nucleotide sequence described by the | |
| | general formula of a-b, where a is any integer between 1 to 118 of | |
| | SEQ ID NO:122, h is an integer of 15 to 132, where both a and b | |
| | correspond to the positions of nucleotide residues shown in SEQ ID | |
| | NO:122, and where b is greater than or equal to a +14. | |
| 828688 | Preferably excluded from the present invention are one or more | T92794, T92816, N50876, W20089, N90429, AA086404, |
| | polynucleotides comprising a nucleotide sequence described by the | AA112766, AA130846, AA195042, AA194974, AA235868, |
| | general formula of a-b, where a is any integer between 1 to 1886 of | AA554284, AA639411, AA573456, AA804901, AA828540 |
| | SEQ ID NO:123, b is an integer of 15 to 1900, where both a and b | |
| | correspond to the positions of nucleotide residues shown in SEQ ID | |
| | NO:123, and where b is greater than or equal to a +14. | |
| 828689 | Preferably excluded from the present invention are one or more | |
| | polynucleotides comprising a nucleotide sequence described by the | |
| | general formula of a-b, where a is any integer between 1 to 1236 of | |
| | SEQ ID NO:124, b is an integer of 15 to 1250, where both a and b | |
| | correspond to the positions of nucleotide residues shown in SEQ ID | |
| | NO:124, and where b is greater than or equal to a +14. | |
| 828692 | Preferably excluded from the present invention are one or more | T72780, R07981, R09868, T96304, H51978 |
| | polynucleotides comprising a nucleotide sequence described by the | |
| | general formula of a-b, where a is any integer between 1 to 1175 of | |
| | SEQ ID NO:125, b is an integer of 15 to 1189, where both a and b | |
| | correspond to the positions of nucleotide residues shown in SEQ ID | |
| | NO:125, and where b is greater than or equal to a +14. | |
| 828693 | Preferably excluded from the present invention are one or more | |
| | polynucleotides comprising a nucleotide sequence described by the | |
| | general formula of a-b, where a is any integer between 1 to 414 of | |
| | SEQ ID NO:126, b is an integer of 15 to 428, where both a and b | |
| | correspond to the positions of nucleotide residues shown in SEQ ID | |
| | NO:126, and where b is greater than or equal to a +14. | |
| 828694 | Preferably excluded from the present invention are one or more | R02262 |
| | polynucleotides comprising a nucleotide sequence described by the | |
| | general formula of a-b, where a is any integer between 1 to 631 of | |
| | SEQ ID NO:127, b is an integer of 15 to 645, where both a and b | |
| | correspond to the positions of nucleotide residues shown in SEQ ID | |
| | NO:127, and where b is greater than or equal to a +14. | |
| 828696 | Preferably excluded from the present invention are one or more | |
| | polynucleotides comprising a nucleotide sequence described by the | |
| | general formula of a-b, where a is any integer between 1 to 482 of | |
| | SEQ ID NO:128, b is an integer of 15 to 496, where both a and b | |
| | correspond to the positions of nucleotide residues shown in SEQ ID | |
| | NO:128, and where b is greater than or equal to a +14. | |
| 828697 | Preferably excluded from the present invention are one or more | AA059063 |
| | polynucleotides comprising a nucleotide sequence described by the | |
| | general formula of a-b, where a is any integer between 1 to 410 of | |
| | SEQ ID NO:129, b is an integer of 15 to 424, where both a and b | |
| | correspond to the positions of nucleotide residues shown in SEQ ID | |
| | NO:129, and where b is greater than or equal to a +14. | |
| 828699 | Preferably excluded from the present invention are one or more | R75912, H40206, H40207, H41559, R87478, H52696, H52717, |
| | polynucleotides comprising a nucleotide sequence described by the | N40190, AA503759, AA504325, AA553825, AA553899, H64647, |
| | general formula of a-b, where a is any integer between 1 to 1695 of | AA582193, AA580220, AA687790, AA809845, AA917674, |
| | SEQ ID NO:130, b is an integer of 15 to 1709, where both a and b | AA935183, AI004172, AI027576, C14410, C14461, C14497, |
| | correspond to the positions of nucleotide residues shown in SEQ ID | C14511 |
| | NO:130, and where b is greater than or equal to a +14. | |
| 828702 | Preferably excluded from the present invention are one or more | N79392 |
| | polynucleotides comprising a nucleotide sequence described by the | |
| | general formula of a-b, where a is any integer between 1 to 852 of | |
| | SEQ ID NO:131, b is an integer of 15 to 866, where both a and b | |
| | correspond to the positions of nucleotide residues shown in SEQ ID | |
| | NO:131, and where b is greater than or equal to a +14. | |
| 828703 | Preferably excluded from the present invention are one or more | T69829, R59224, H11661, AA587352, AA807572, AA806747, |
| | polynucleotides comprising a nucleotide sequence described by the | AA865576, AA912231, AI002338 |
| | general formula of a-b, where a is any integer between 1 to 1579 of | |
| | SEQ ID NO:132, b is an integer of 15 to 1593, where both a and b | |
| | correspond to the positions of nucleotide residues shown in SEQ ID | |
| | NO:132, and where his greater than or equal to a +14. | |
| 828704 | Preferably excluded from the present invention are one or more | |
| | polynucleotides comprising a nucleotide sequence described by the | |
| | general formula of a-b, where a is any integer between 1 to 394 of | |
| | SEQ ID NO:133, b is an integer of 15 to 408, where both a and b | |
| | correspond to the positions of nucleotide residues shown in SEQ ID | |
| | NO:133, and where his greater than or equal to a +14. | |
| 828706 | Preferably excluded from the present invention are one or more | AA099313, AA099927, AA101522, AA101521, AA102781, |
| | polynucleotides comprising a nucleotide sequence described by the | AA102782, AA126249, AA134732, AA459009, AA459230, |
| | general formula of a-b, where a is any integer between 1 to 2727 of | AA524248, AA524247, AA622869, AA744977, AA933725, |
| | SEQ ID NO:134, b is an integer of 15 to 2741, where both a and b | AI000417, U65740 |
| | correspond to the positions of nucleotide residues shown in SEQ ID | |
| | NO:134, and where b is greater than or equal to a +14. | |
| 828708 | Preferably excluded from the present invention are one or more | AA736960 |
| | polynucleotides comprising a nucleotide sequence described by the | |
| | general formula of a-b, where a is any integer between 1 to 672 of | |
| | SEQ ID NO:135, b is an integer of 15 to 686, where both a and b | |
| | correspond to the positions of nucleotide residues shown in SEQ ID | |
| | NO:135, and where b is greater than or equal to a +14. | |
| 828711 | Preferably excluded from the present invention are one or more | |
| | polynucleotides comprising a nucleotide sequence described by the | |
| | general formula of a-b, where a is any integer between 1 to 228 of | |
| | SEQ ID NO:136, b is an integer of 15 to 242, where both a and b | |
| | correspond to the positions of nucleotide residues shown in SEQ ID | |
| | NO:136, and where b is greater than or equal to a +14. | |
| 828712 | Preferably excluded from the present invention are one or more | |
| | polynucleotides comprising a nucleotide sequence described by the | |
| | general formula of a-b, where a is any integer between 1 to 531 of | |
| | SEQ ID NO:137, b is an integer of 15 to 545, where both a and b | |
| | correspond to the positions of nucleotide residues shown in SEQ ID | |
| | NO:137, and where his greater than or equal to a +14. | |
| 828713 | Preferably excluded from the present invention are one or more | |
| | polynucleotides comprising a nucleotide sequence described by the | |
| | general formula of a-b, where a is any integer between 1 to 382 of | |
| | SEQ ID NO:138, b is an integer of 15 to 396, where both a and b | |
| | correspond to the positions of nucleotide residues shown in SEQ ID | |
| | NO:138, and where b is greater than or equal to a +14. | |
| 828714 | Preferably excluded from the present invention are one or more | |
| | polynucleotides comprising a nucleotide sequence described by the | |
| | general formula of a-b, where a is any integer between 1 to 2757 of | |
| | SEQ ID NO:139, b is an integer of 15 to 2771, where both a and b | |
| | correspond to the positions of nucleotide residues shown in SEQ ID | |
| | NO:139, and where b is greater than or equal to a +14. | |
| 828715 | Preferably excluded from the present invention are one or more | |
| | polynucleotides comprising a nucleotide sequence described by the | |
| | general formula of a-b, where a is any integer between 1 to 408 of | |
| | SEQ ID NO:140, b is an integer of 15 to 422, where both a and b | |
| | correspond to the positions of nucleotide residues shown in SEQ ID | |
| | NO:140, and where b is greater than or equal to a +14. | |
| 828718 | Preferably excluded from the present invention are one or more | R52059, R52058, H85868, W92475, AA046292, AA463500, |
| | polynucleotides comprising a nucleotide sequence described by the | AA463546, AA576113, AA862446 |
| | general formula of a-b, where a is any integer between 1 to 1616 of | |
| | SEQ ID NO:141, b is an integer of 15 to 1630, where both a and b | |
| | correspond to the positions of nucleotide residues shown in SEQ ID | |
| | NO:141, and where b is greater than or equal to a +14. | |
| 828723 | Preferably excluded from the present invention are one or more | |
| | polynucleotides comprising a nucleotide sequence described by the | |
| | general formula of a-b, where a is any integer between 1 to 250 of | |
| | SEQ ID NO:142, b is an integer of 15 to 264, where both a and b | |
| | correspond to the positions of nucleotide residues shown in SEQ ID | |
| | NO:142, and where b is greater than or equal to a +14. | |
| 828726 | Preferably excluded from the present invention are one or more | |
| | polynucleotides comprising a nucleotide sequence described by the | |
| | general formula of a-b, where a is any integer between 1 to 622 of | |
| | SEQ ID NO:143, b is an integer of 15 to 636, where both a and b | |
| | correspond to the positions of nucleotide residues shown in SEQ ID | |
| | NO:143, and where b is greater than or equal to a +14. | |
| 828728 | Preferably excluded from the present invention are one or more | N39508, W05658, AA083301, AA159253, AA195825 |
| | polynucleotides comprising a nucleotide sequence described by the | |
| | general formula of a-b, where a is any integer between 1 to 486 of | |
| | SEQ ID NO:144, b is an integer of 15 to 500, where both a and b | |
| | correspond to the positions of nucleotide residues shown in SEQ ID | |
| | NO:144, and where b is greater than or equal to a +14. | |
| 828730 | Preferably excluded from the present invention are one or more | |
| | polynucleotides comprising a nucleotide sequence described by the | |
| | general formula of a-b, where a is any integer between 1 to 1931 of | |
| | SEQ ID NO:145, b is an integer of 15 to 1945, where both a and b | |
| | correspond to the positions of nucleotide residues shown in SEQ ID | |
| | NO:145, and where b is greater than or equal to a +14. | |
| 828732 | Preferably excluded from the present invention are one or more | |
| | polynucleotides comprising a nucleotide sequence described by the | |
| | general formula of a-b, where a is any integer between 1 to 1100 of | |
| | SEQ ID NO:146, b is an integer of 15 to 1114, where both a and b | |
| | correspond to the positions of nucleotide residues shown in SEQ ID | |
| | NO:146, and where b is greater than or equal to a +14. | |
| 828733 | Preferably excluded from the present invention are one or more | |
| | polynucleotides comprising a nucleotide sequence described by the | |
| | general formula of a-b, where a is any integer between 1 to 532 of | |
| | SEQ ID NO:147, b is an integer of 15 to 546, where both a and b | |
| | correspond to the positions of nucleotide residues shown in SEQ ID | |
| | NO:147, and where b is greater than or equal to a +14. | |
| 828735 | Preferably excluded from the present invention are one or more | |
| | polynucleotides comprising a nucleotide sequence described by the | |
| | general formula of a-b, where a is any integer between 1 to 1749 of | |
| | SEQ ID NO:148, b is an integer of 15 to 1763, where both a and b | |
| | correspond to the positions of nucleotide residues shown in SEQ ID | |
| | NO:148, and where b is greater than or equal to a +14. | |
| 828736 | Preferably excluded from the present invention are one or more | |
| | polynucleotides comprising a nucleotide sequence described by the | |
| | general formula of a-b, where a is any integer between 1 to 357 of | |
| | SEQ ID NO:149, b is an integer of 15 to 371, where both a and b | |
| | correspond to the positions of nucleotide residues shown in SEQ ID | |
| | NO:149, and where b is greater than or equal to a +14. | |
| 828739 | Preferably excluded from the present invention are one or more | R36043 |
| | polynucleotides comprising a nucleotide sequence described by the | |
| | general formula of a-b, where a is any integer between 1 to 418 of | |
| | SEQ ID NO:150, b is an integer of 15 to 432, where both a and b | |
| | correspond to the positions of nucleotide residues shown in SEQ ID | |
| | NO:150, and where b is greater than or equal to a +14. | |
| 828740 | Preferably excluded from the present invention are one or more | |
| | polynucleotides comprising a nucleotide sequence described by the | |
| | general formula of a-b, where a is any integer between 1 to 387 of | |
| | SEQ ID NO:151, b is an integer of 15 to 401, where both a and b | |
| | correspond to the positions of nucleotide residues shown in SEQ ID | |
| | NO:151, and where b is greater than or equal to a +14. | |
| 828742 | Preferably excluded from the present invention are one or more | |
| | polynucleotides comprising a nucleotide sequence described by the | |
| | general formula of a-b, where a is any integer between 1 to 837 of | |
| | SEQ ID NO:152, b is an integer of 15 to 851, where both a and b | |
| | correspond to the positions of nucleotide residues shown in SEQ ID | |
| | NO:152, and where b is greater than or equal to a +14. | |
| 828748 | Preferably excluded from the present invention are one or more | AA225966, AA226113, AA229173, AA229167, AA229535, |
| | polynucleotides comprising a nucleotide sequence described by the | AA243985, AA244099, AA244206, AA259243, AA420690, |
| | general formula of a-b, where a is any integer between Ito 1664 of | AA467761, AA467944, AA468120, AA468151, AA468187, |
| | SEQ ID NO:153, b is an integer of 15 to 1678, where both a and b | AA468326, AA468918, AA468995, AA469129, AA469199, |
| | correspond to the positions of nucleotide residues shown in SEQ ID | AA470575, AA502955, AA503272, AA506649, AA507335, |
| | NO:153, and where b is greater than or equal to a +14. | AA507799, AA514825, AA522473, AA522848, AA524651, |
| | | AA524893, AA525058, AA531386, AA532387, AA532926, |
| | | AA534072, AA534246, AA535303, AA535837, AA561447, |
| | | AA551738, AA558900, AA588263, AA587715, AA593380, |
| | | AA595047, AA595357, AA595465, AA595601, AA603572, |
| | | AA604709, AA635888, AA640473, AA569666, AA569670, |
| | | AA573539, AA573587, AA574390, AA578439, AA578628, |
| | | AA579001, AA579026, AA579117, AA579310, AA565962, |
| | | AA566046, AA654974, AA657781, AA657831, AA658156, |
| | | AA658207, AA688243, AA658463, AA658877, AA659198, |
| | | AA659306, AA687563, AA687852, AA742871, AA876666, |
| | | AA887095, AA888488, AA934855, AA935419, AA937807, |
| 828749 | Preferably excluded from the present invention are one or more | T65384, R46577, R52660, R46577, H11492, N73810, N99718, |
| | polynucleotides comprising a nucleotide sequence described by the | AA121044, AA126520, AA126579, AA126687 |
| | general formula of a-b, where a is any integer between 1 to 1144 of | |
| | SEQ ID NO:154, b is an integer of 15 to 1158, where both a and b | |
| | correspond to the positions of nucleotide residues shown in SEQ ID | |
| | NO:154, and where b is greater than or equal to a +14. | |
| 828752 | Preferably excluded from the present invention are one or more | AA492170 |
| | polynucleotides comprising a nucleotide sequence described by the | |
| | general formula of a-b, where a is any integer between 1 to 1955 of | |
| | SEQ ID NO:155, b is an integer of 15 to 1969, where both a and b | |
| | correspond to the positions of nucleotide residues shown in SEQ ID | |
| | NO:155, and where b is greater than or equal to a +14. | |
| 828753 | Preferably excluded from the present invention are one or more | |
| | polynucleotides comprising a nucleotide sequence described by the | |
| | general formula of a-b, where a is any integer between 1 to 386 of | |
| | SEQ ID NO:156, b is an integer of 15 to 400, where both a and b | |
| | correspond to the positions of nucleotide residues shown in SEQ ID | |
| | NO:156, and where b is greater than or equal to a +14. | |
| 828754 | Preferably excluded from the present invention are one or more | N42714, N32500 |
| | polynucleotides comprising a nucleotide sequence described by the | |
| | general formula of a-b, where a is any integer between 1 to 708 of | |
| | SEQ ID NO:157, b is an integer of 15 to 722, where both a and b | |
| | correspond to the positions of nucleotide residues shown in SEQ ID | |
| | NO:157, and where b is greater than or equal to a +14. | |
| 828757 | Preferably excluded from the present invention are one or more | T90246, T90691, R14702, R34647, R42424, R49176, R42424, |
| | polynucleotides comprising a nucleotide sequence described by the | R49176, H06287, H06339, H14778, N69116, C03936, C15913 |
| | general formula of a-b, where a is any integer between 1 to 1186 of | |
| | SEQ ID NO:158, b is an integer of 15 to 1200, where both a and b | |
| | correspond to the positions of nucleotide residues shown in SEQ ID | |
| | NO:158, and where b is greater than or equal to a +14. | |
| 828761 | Preferably excluded from the present invention are one or more | |
| | polynucleotides comprising a nucleotide sequence described by the | |
| | general formula of a-b, where a is any integer between 1 to 331 of | |
| | SEQ ID NO:159, b is an integer of 15 to 345, where both a and b | |
| | correspond to the positions of nucleotide residues shown in SEQ ID | |
| | NO:159, and where b is greater than or equal to a +14. | |
| 828762 | Preferably excluded from the present invention are one or more | |
| | polynucleotides comprising a nucleotide sequence described by the | |
| | general formula of a-b, where a is any integer between 1 to 462 of | |
| | SEQ ID NO:160, b is an integer of 15 to 476, where both a and b | |
| | correspond to the positions of nucleotide residues shown in SEQ ID | |
| | NO:160, and where b is greater than or equal to a +14. | |
| 828764 | Preferably excluded from the present invention are one or more | |
| | polynucleotides comprising a nucleotide sequence described by the | |
| | general formula of a-b, where a is any integer between 1 to 506 of | |
| | SEQ ID NO:161, b is an integer of 15 to 520, where both a and b | |
| | correspond to the positions of nucleotide residues shown in SEQ ID | |
| | NO:161, and where b is greater than or equal to a +14. | |
| 828765 | Preferably excluded from the present invention are one or more | |
| | polynucleotides comprising a nucleotide sequence described by the | |
| | general formula of a-b, where a is any integer between 1 to 325 of | |
| | SEQ ID NO:162, b is an integer of 15 to 339, where both a and b | |
| | correspond to the positions of nucleotide residues shown in SEQ ID | |
| | NO:162, and where b is greater than or equal to a +14. | |
| 828766 | Preferably excluded from the present invention are one or more | |
| | polynucleotides comprising a nucleotide sequence described by the | |
| | general formula of a-b, where a is any integer between 1 to 343 of | |
| | SEQ ID NO:163, b is an integer of 15 to 357, where both a and b | |
| | correspond to the positions of nucleotide residues shown in SEQ ID | |
| | NO:163, and where b is greater than or equal to a +14. | |
| 828767 | Preferably excluded from the present invention are one or more | |
| | polynucleotides comprising a nucleotide sequence described by the | |
| | general formula of a-b, where a is any integer between 1 to 1065 of | |
| | SEQ ID NO:164, b is an integer of 15 to 1079, where both a and b | |
| | correspond to the positions of nucleotide residues shown in SEQ ID | |
| | NO:164, and where b is greater than or equal to a +14. | |
| 828768 | Preferably excluded from the present invention are one or more | |
| | polynucleotides comprising a nucleotide sequence described by the | |
| | general formula of a-b, where a is any integer between 1 to 1311 of | |
| | SEQ ID NO:165, b is an integer of 15 to 1325, where both a and b | |
| | correspond to the positions of nucleotide residues shown in SEQ ID | |
| | NO:165, and where b is greater than or equal to a +14. | |
| 828770 | Preferably excluded from the present invention are one or more | |
| | polynucleotides comprising a nucleotide sequence described by the | |
| | general formula of a-b, where a is any integer between 1 to 380 of | |
| | SEQ ID NO:166, b is an integer of 15 to 394, where both a and b | |
| | correspond to the positions of nucleotide residues shown in SEQ ID | |
| | NO:166, and where b is greater than or equal to a +14. | |
| 828771 | Preferably excluded from the present invention are one or more | |
| | polynucleotides comprising a nucleotide sequence described by the | |
| | general formula of a-b, where a is any integer between 1 to 503 of | |
| | SEQ ID NO:167, b is an integer of 15 to 517, where both a and b | |
| | correspond to the positions of nucleotide residues shown in SEQ ID | |
| | NO:167, and where b is greater than or equal to a +14. | |
| 828772 | Preferably excluded from the present invention are one or more | |
| | polynucleotides comprising a nucleotide sequence described by the | |
| | general formula of a-b, where a is any integer between 1 to 327 of | |
| | SEQ ID NO:168, b is an integer of 15 to 341, where both a and b | |
| | correspond to the positions of nucleotide residues shown in SEQ ID | |
| | NO:168, and where b is greater than or equal to a +14. | |
| 828773 | Preferably excluded from the present invention are one or more | |
| | polynucleotides comprising a nucleotide sequence described by the | |
| | general formula of a-b, where a is any integer between 1 to 336 of | |
| | SEQ ID NO:169, b is an integer of 15 to 350, where both a and b | |
| | correspond to the positions of nucleotide residues shown in SEQ ID | |
| | NO:169, and where b is greater than or equal to a +14. | |
| 828775 | Preferably excluded from the present invention are one or more | |
| | polynucleotides comprising a nucleotide sequence described by the | |
| | general formula of a-b, where a is any integer between 1 to 427 of | |
| | SEQ ID NO:170, b is an integer of 15 to 441, where both a and b | |
| | correspond to the positions of nucleotide residues shown in SEQ ID | |
| | NO:170, and where b is greater than or equal to a +14. | |
| 828776 | Preferably excluded from the present invention are one or more | AA127485 |
| | polynucleotides comprising a nucleotide sequence described by the | |
| | general formula of a-b, where a is any integer between 1 to 389 of | |
| | SEQ ID NO:171, b is an integer of 15 to 403, where both a and b | |
| | correspond to the positions of nucleotide residues shown in SEQ ID | |
| | NO:171, and where b is greater than or equal to a +14. | |
| 828777 | Preferably excluded from the present invention are one or more | T86451, R87531, R87627, R91402, R92659, H98729, N24299, |
| | polynucleotides comprising a nucleotide sequence described by the | W19089, W20421, AA454940, AA605076, AA639539, |
| | general formula of a-b, where a is any integer between 1 to 970 of | AA662751, AA714010, AA743934, AA746310, AA888099, |
| | SEQ ID NO:172, b is an integer of 15 to 984, where both a and b | AA953728, AA976688, A1027564 |
| | correspond to the positions of nucleotide residues shown in SEQ ID | |
| | NO:172, and where b is greater than or equal to a +14. | |
| 828778 | Preferably excluded from the present invention are one or more | |
| | polynucleotides comprising a nucleotide sequence described by the | |
| | general formula of a-b, where a is any integer between 1 to 1180 of | |
| | SEQ ID NO:173, b is an integer of 15 to 1194, where both a and b | |
| | correspond to the positions of nucleotide residues shown in SEQ ID | |
| | NO:173, and where b is greater than or equal to a +14. | |
| 828780 | Preferably excluded from the present invention are one or more | |
| | polynucleotides comprising a nueleotide sequence described by the | |
| | general formula of a-b, where a is any integer between 1 to 687 of | |
| | SEQ ID NO:174, b is an integer of 15 to 701, where both a and b | |
| | correspond to the positions of nucleotide residues shown in SEQ ID | |
| | NO:174, and where b is greater than or equal to a +14. | |
| 828781 | Preferably excluded from the present invention are one or more | R17769, R39304, R42342, R42342, R61526, H08114, H08622, |
| | polynucleotides comprising a nucleotide sequence described by the | N63035, AA039717, AA039716, AA039852, AA235700, |
| | general formula of a-b, where a is any integer between ito 1167 of | AA255466, AA461108, AA918115, AA938595, W00811, C00278 |
| | SEQ ID NO:175, b is an integer of 15 to 1181, where both a and b | |
| | correspond to the positions of nucleotide residues shown in SEQ ID | |
| | NO:175, and where b is greater than or equal to a +14. | |
| 828782 | Preferably excluded from the present invention are one or more | |
| | polynucleotides comprising a nucleotide sequence described by the | |
| | general formula of a-b, where a is any integer between 1 to 475 of | |
| | SEQ ID NO:176, b is an integer of 15 to 489, where both a and b | |
| | correspond to the positions of nucleotide residues shown in SEQ ID | |
| | NO:176, and where b is greater than or equal to a +14. | |
| 828783 | Preferably excluded from the present invention are one or more | |
| | polynucleotides comprising a nucleotide sequence described by the | |
| | general formula of a-b, where a is any integer between 1 to 239 of | |
| | SEQ ID NO:177, his an integer of 15 to 253, where both a and b | |
| | correspond to the positions of nucleotide residues shown in SEQ ID | |
| | NO:177, and where b is greater than or equal to a +14. | |
| 828784 | Preferably excluded from the present invention are one or more | |
| | polynucleotides comprising a nucleotide sequence described by the | |
| | general formula of a-b, where a is any integer between 1 to 379 of | |
| | SEQ ID NO:178, b is an integer of 15 to 393, where both a and b | |
| | correspond to the positions of nucleotide residues shown in SEQ ID | |
| | NO:178, and where b is greater than or equal to a +14. | |
| 828785 | Preferably excluded from the present invention are one or more | H28735, AA541256, AA935694 |
| | polynucleotides comprising a nucleotide sequence described by the | |
| | general formula of a-b, where a is any integer between 1 to 451 of | |
| | SEQ ID NO:179, b is an integer of 15 to 465, where both a and b | |
| | correspond to the positions of nucleotide residues shown in SEQ ID | |
| | NO:179, and where b is greater than or equal to a +14. | |
| 828786 | Preferably excluded from the present invention are one or more | T50920 |
| | polynucleotides comprising a nucleotide sequence described by the | |
| | general formula of a-b, where a is any integer between 1 to 518 of | |
| | SEQ ID NO:180, b is an integer of 15 to 532, where both a and b | |
| | correspond to the positions of nucleotide residues shown in SEQ ID | |
| | NO:180, and where b is greater than or equal to a +14. | |
| 828788 | Preferably excluded from the present invention are one or more | AA765439 |
| | polynucleotides comprising a nucleotide sequence described by the | |
| | general formula of a-b, where a is any integer between 1 to 800 of | |
| | SEQ ID NO:181, b is an integer of 15 to 814, where both a and b | |
| | correspond to the positions of nucleotide residues shown in SEQ ID | |
| | NO:181, and where b is greater than or equal to a +14. | |
| 828790 | Preferably excluded from the present invention are one or more | |
| | polynucleotides comprising a nucleotide sequence described by the | |
| | general formula of a-b, where a is any integer between 1 to 303 of | |
| | SEQ ID NO:182, b is an integer of 15 to 317, where both a and b | |
| | correspond to the positions of nucleotide residues shown in SEQ ID | |
| | NO:182, and where his greater than or equal to a +14. | |
| 828791 | Preferably excluded from the present invention are one or more | |
| | polynucleotides comprising a nucleotide sequence described by the | |
| | general formula of a-b, where a is any integer between 1 to 229 of | |
| | SEQ ID NO:183, b is an integer of 15 to 243, where both a and b | |
| | correspond to the positions of nucleotide residues shown in SEQ ID | |
| | NO:183, and where b is greater than or equal to a +14. | |
| 828792 | Preferably excluded from the present invention are one or more | |
| | polynucleotides comprising a nucleotide sequence described by the | |
| | general formula of a-b, where a is any integer between 1 to 1134 of | |
| | SEQ ID NO:184, b is an integer of 15 to 1148, where both a and b | |
| | correspond to the positions of nucleotide residues shown in SEQ ID | |
| | NO:184, and where b is greater than or equal to a +14. | |
| 828794 | Preferably excluded from the present invention are one or more | |
| | polynucleotides comprising a nucleotide sequence described by the | |
| | general formula of a-b, where a is any integer between 1 to 1957 of | |
| | SEQ ID NO:185, b is an integer of 15 to 1971, where both a and b | |
| | correspond to the positions of nucleotide residues shown in SEQ ID | |
| | NO:185, and where b is greater than or equal to a +14. | |
| 828797 | Preferably excluded from the present invention are one or more | |
| | polynucleotides comprising a nucleotide sequence described by the | |
| | general formula of a-b, where a is any integer between 1 to 352 of | |
| | SEQ ID NO:186, b is an integer of 15 to 366, where both a and b | |
| | correspond to the positions of nucleotide residues shown in SEQ ID | |
| | NO:186, and where b is greater than or equal to a +14. | |
| 828798 | Preferably excluded from the present invention are one or more | |
| | polynucleotides comprising a nucleotide sequence described by the | |
| | general formula of a-b, where a is any integer between 1 to 336 of | |
| | SEQ ID NO:187, b is an integer of 15 to 350, where both a and b | |
| | correspond to the positions of nucleotide residues shown in SEQ ID | |
| | NO:187, and where b is greater than or equal to a +14. | |
| 828799 | Preferably excluded from the present invention are one or more | R92181 |
| | polynucleotides comprising a nucleotide sequence described by the | |
| | general formula of a-b, where a is any integer between 1 to 361 of | |
| | SEQ ID NO:188, b is an integer of 15 to 375, where both a and b | |
| | correspond to the positions of nucleotide residues shown in SEQ ID | |
| | NO:188, and where b is greater than or equal to a +14. | |
| 828801 | Preferably excluded from the present invention are one or more | |
| | polynucleotides comprising a nucleotide sequence described by the | |
| | general formula of a-b, where a is any integer between 1 to 351 of | |
| | SEQ ID NO:189, b is an integer of 15 to 365, where both a and b | |
| | correspond to the positions of nucleotide residues shown in SEQ ID | |
| | NO:189, and where b is greater than or equal to a +14. | |
| 828802 | Preferably excluded from the present invention are one or more | |
| | polynucleotides comprising a nucleotide sequence described by the | |
| | general formula of a-b, where a is any integer between 1 to 803 of | |
| | SEQ ID NO:190, b is an integer of 15 to 817, where both a and b | |
| | correspond to the positions of nucleotide residues shown in SEQ ID | |
| | NO:190, and where b is greater than or equal to a +14. | |
| 828803 | Preferably excluded from the present invention are one or more | |
| | polynucleotides comprising a nucleotide sequence described by the | |
| | general formula of a-b, where a is any integer between 1 to 576 of | |
| | SEQ ID NO:191, b is an integer of 15 to 590, where both a and b | |
| | correspond to the positions of nucleotide residues shown in SEQ ID | |
| | NO:191, and where b is greater than or equal to a +14. | |
| 828804 | Preferably excluded from the present invention are one or more | |
| | polynucleotides comprising a nucleotide sequence described by the | |
| | general formula of a-b, where a is any integer between 1 to 294 of | |
| | SEQ ID NO:192, b is an integer of 15 to 308, where both a and b | |
| | correspond to the positions of nucleotide residues shown in SEQ ID | |
| | NO:192, and where b is greater than or equal to a +14. | |
| 828805 | Preferably excluded from the present invention are one or more | |
| | polynucleotides comprising a nucleotide sequence described by the | |
| | general formula of a-b, where a is any integer between 1 to 329 of | |
| | SEQ ID NO:193, b is an integer of 15 to 343, where both a and b | |
| | correspond to the positions of nucleotide residues shown in SEQ ID | |
| | NO:193, and where his greater than or equal to a +14. | |
| 828807 | Preferably excluded from the present invention are one or more | AA507550, AA613671, AA991871, AI073898 |
| | polynucleotides comprising a nucleotide sequence described by the | |
| | general formula of a-b, where a is any integer between 1 to 676 of | |
| | SEQ ID NO:194, b is an integer of 15 to 690, where both a and b | |
| | correspond to the positions of nucleotide residues shown in SEQ ID | |
| | NO:194, and where b is greater than or equal to a +14. | |
| 828809 | Preferably excluded from the present invention are one or more | |
| | polynucleotides comprising a nucleotide sequence described by the | |
| | general formula of a-b, where a is any integer between 1 to 223 of | |
| | SEQ ID NO:195, b is an integer of 15 to 237, where both a and b | |
| | correspond to the positions of nucleotide residues shown in SEQ ID | |
| | NO:195, and where b is greater than or equal to a +14. | |
| 828810 | Preferably excluded from the present invention are one or more | |
| | polynucleotides comprising a nucleotide sequence described by the | |
| | general formula of a-b, where a is any integer between 1 to 253 of | |
| | SEQ ID NO:196, b is an integer of 15 to 267, where both a and b | |
| | correspond to the positions of nucleotide residues shown in SEQ ID | |
| | NO:196, and where b is greater than or equal to a +14. | |
| 828811 | Preferably excluded from the present invention are one or more | |
| | polynucleotides comprising a nucleotide sequence described by the | |
| | general formula of a-b, where a is any integer between 1 to 429 of | |
| | SEQ ID NO:197, b is an integer of 15 to 443, where both a and b | |
| | correspond to the positions of nucleotide residues shown in SEQ ID | |
| | NO:197, and where b is greater than or equal to a +14. | |
| 828817 | Preferably excluded from the present invention are one or more | |
| | polynucleotides comprising a nucleotide sequence described by the | |
| | general formula of a-b, where a is any integer between 1 to 194 of | |
| | SEQ ID NO:198, b is an integer of 15 to 208, where both a and b | |
| | correspond to the positions of nucleotide residues shown in SEQ ID | |
| | NO:198, and where b is greater than or equal to a +14. | |
| 828818 | Preferably excluded from the present invention are one or more | |
| | polynucleotides comprising a nucleotide sequence described by the | |
| | general formula of a-b, where a is any integer between 1 to 244 of | |
| | SEQ ID NO:199, b is an integer of 15 to 258, where both a and b | |
| | correspond to the positions of nucleotide residues shown in SEQ ID | |
| | NO:199, and where b is greater than or equal to a +14. | |
| 828819 | Preferably excluded from the present invention are one or more | R28397, R35050, R82429, AA523252, AA541515, AA888589, |
| | polynucleotides comprising a nucleotide sequence described by the | AA931260, AA969512, N90287 |
| | general formula of a-b, where a is any integer between 1 to 879 of | |
| | SEQ ID NO:200, b is an integer of 15 to 893, where both a and b | |
| | correspond to the positions of nucleotide residues shown in SEQ ID | |
| | NO:200, and where b is greater than or equal to a +14, | |
| 828820 | Preferably excluded from the present invention are one or more | |
| | polynucleotides comprising a nucleotide sequence described by the | |
| | general formula of a-b, where a is any integer between 1 to 489 of | |
| | SEQ ID NO:201, b is an integer of 15 to 503, where both a and b | |
| | correspond to the positions of nucleotide residues shown in SEQ ID | |
| | NO:201, and where b is greater than or equal to a +14. | |
| 828821 | Preferably excluded from the present invention are one or more | |
| | polynucleotides comprising a nucleotide sequence described by the | |
| | general formula of a-b, where a is any integer between 1 to 424 of | |
| | SEQ ID NO:202, b is an integer of 15 to 438, where both a and b | |
| | correspond to the positions of nucleotide residues shown in SEQ ID | |
| | NO:202, and where b is greater than or equal to a +14. | |
| 828823 | Preferably excluded from the present invention are one or more | |
| | polynucleotides comprising a nucleotide sequence described by the | |
| | general formula of a-b, where a is any integer between 1 to 862 of | |
| | SEQ ID NO:203, b is an integer of 15 to 876, where both a and b | |
| | correspond to the positions of nucleotide residues shown in SEQ ID | |
| | NO:203, and where b is greater than or equal to a +14. | |
| 828824 | Preferably excluded from the present invention are one or more | T63961, R37805, R41200, R41200, 1406703, H14569, N35284, |
| | polynucleotides comprising a nucleotide sequence described by the | W84891, W84386, AA020009, AA115923, AA191098, |
| | general formula of a-b, where a is any integer between 1 to 1490 of | AA720881, AA825322, AA007194 |
| | SEQ ID NO:204, b is an integer of 15 to 1504, where both a and b | |
| | correspond to the positions of nucleotide residues shown in SEQ ID | |
| | NO:204, and where b is greater than or equal to a +14. | |
| 828825 | Preferably excluded from the present invention are one or more | T90840, R97506, R97507, T456561, H9059, AA548594 |
| | polynucleotides comprising a nucleotide sequence described by the | |
| | general formula of a-b, where a is any integer between 1 to 511 of | |
| | SEQ ID NO:205, b is an integer of 15 to 525, where both a and b | |
| | correspond to the positions of nucleotide residues shown in SEQ ID | |
| | NO:205, and where b is greater than or equal to a +14, | |
| 828826 | Preferably excluded from the present invention are one or more | R54121, H53524, H83780, N33845, AA150188, AA150364, |
| | polynucleotides comprising a nucleotide sequence described by the | AA193510, AA236206, AA236207, AA256878, AA255472, |
| | general formula of a-b, where a is any integer between 1 to 2480 of | AA292484, AA292485, AA814616, AA808712, AA812205 |
| | SEQ ID NO:206, b is an integer of 15 to 2494, where both a and b | |
| | correspond to the positions of nucleotide residues shown in SEQ ID | |
| | NO:206, and where b is greater than or equal to a +14. | |
| 828829 | Preferably excluded from the present invention are one or more | |
| | polynucleotides comprising a nucleotide sequence described by the | |
| | general formula of a-b, where a is any integer between 1 to 866 of | |
| | SEQ ID NO:207, b is an integer of 15 to 880, where both a and b | |
| | correspond to the positions of nucleotide residues shown in SEQ ID | |
| | NO:207, and where b is greater than or equal to a +14. | |
| 828830 | Preferably excluded from the present invention are one or more | W47311 |
| | polynucleotides comprising a nucleotide sequence described by the | |
| | general formula of a-b, where a is any integer between 1 to 626 of | |
| | SEQ ID NO:208, b is an integer of 15 to 640, where both a and b | |
| | correspond to the positions of nucleotide residues shown in SEQ ID | |
| | NO:208, and where b is greater than or equal to a +14. | |
| 828833 | Preferably excluded from the present invention are one or more | |
| | polynucleotides comprising a nucleotide sequence described by the | |
| | general formula of a-b, where a is any integer between 1 to 289 of | |
| | SEQ ID NO:209, b is an integer of 15 to 303, where both a and b | |
| | correspond to the positions of nucleotide residues shown in SEQ ID | |
| | NO:209, and where b is greater than or equal to a +14. | |
| 828835 | Preferably excluded from the present invention are one or more | |
| | polynucleotides comprising a nucleotide sequence described by the | |
| | general formula of a-b, where a is any integer between 1 to 1154 of | |
| | SEQ ID NO:210, his an integer of 15 to 1168, where both a and b | |
| | correspond to the positions of nucleotide residues shown in SEQ ID | |
| | NO:210, and where b is greater than or equal to a +14. | |
| 828838 | Preferably excluded from the present invention are one or more | |
| | polynucleotides comprising a nucleotide sequence described by the | |
| | general formula of a-b, where a is any integer between 1 to 3119 of | |
| | SEQ ID NO:211, b is an integer of 15 to 3133, where both a and b | |
| | correspond to the positions of nucleotide residues shown in SEQ ID | |
| | NO:211, and where b is greater than or equal to a +14. | |
| 828840 | Preferably excluded from the present invention are one or more | T67663, N51807, N94795 |
| | polynucleotides comprising a nucleotide sequence described by the | |
| | general formula of a-b, where a is any integer between 1 to 666 of | |
| | SEQ ID NO:212, b is an integer of 15 to 680, where both a and b | |
| | correspond to the positions of nucleotide residues shown in SEQ ID | |
| | NO:212, and where b is greater than or equal to a +14. | |
| 828845 | Preferably excluded from the present invention are one or more | AA278542 |
| | polynucleotides comprising a nucleotide sequence described by the | |
| | general formula of a-b, where a is any integer between 1 to 549 of | |
| | SEQ ID NO:213, b is an integer of 15 to 563, where both a and b | |
| | correspond to the positions of nucleotide residues shown in SEQ ID | |
| | NO:213, and where b is greater than or equal to a +14. | |
| 828846 | Preferably excluded from the present invention are one or more | |
| | polynucleotides comprising a nucleotide sequence described by the | |
| | general formula of a-b, where a is any integer between 1 to 2622 of | |
| | SEQ ID NO:214, b is an integer of 15 to 2636, where both a and b | |
| | correspond to the positions of nucleotide residues shown in SEQ ID | |
| | NO:214, and where b is greater than or equal to a +14. | |
| 828847 | Preferably excluded from the present invention are one or more | |
| | polynucleotides comprising a nucleotide sequence described by the | |
| | general formula of a-b, where a is any integer between 1 to 1808 of | |
| | SEQ ID NO:215, b is an integer of 15 to 1822, where both a and b | |
| | correspond to the positions of nucleotide residues shown in SEQ ID | |
| | NO:215, and where b is greater than or equal to a +14. | |
| 828849 | Preferably excluded from the present invention are one or more | |
| | polynucleotides comprising a nucleotide sequence described by the | |
| | general formula of a-b, where a is any integer between 1 to 3113 of | |
| | SEQ ID NO:216, b is an integer of 15 to 3127, where both a and b | |
| | correspond to the positions of nucleotide residues shown in SEQ ID | |
| | NO:216, and where b is greater than or equal to a +14. | |
| 828850 | referably excluded from the present invention are one or more | T89442, T89529, R00855, R01810, R17037, R44677, R44677, |
| | polynucleotides comprising a nucleotide sequence described by the | W71999, W76568, AA028176, AA594435, AA630811, |
| | general formula of a-b, where a is any integer between 1 to 1515 of | AA640365, AA570503, AA827402, A1001038 |
| | SEQ ID NO:217, b is an integer of 15 to 1529, where both a and b | |
| | correspond to the positions of nucleotide residues shown in SEQ ID | |
| | NO:217, and where b is greater than or equal to a +14. | |
| 828852 | Preferably excluded from the present invention are one or more | N25191, N51394, AA085653 |
| | polynucleotides comprising a nucleotide sequence described by the | |
| | general formula of a-b, where a is any integer between 1 to 1086 of | |
| | SEQ ID NO:218, b is an integer of 15 to 1100, where both a and b | |
| | correspond to the positions of nucleotide residues shown in SEQ ID | |
| | NO:218, and where b is greater than or equal to a +14. | |
| 828853 | Preferably excluded from the present invention are one or more | T69893, R23246, R23322, R23610, R26164, R76851, R78355, |
| | polynucleotides comprising a nucleotide sequence described by the | R78356, W37071, AA281297, AA281298, AA287617, AA286726, |
| | general formula of a-b, where a is any integer between 1 to 1778 of | AA830753, AA907191, AA937081 |
| | SEQ ID NO:219, b is an integer of 15 to 1792, where both a and b | |
| | correspond to the positions of nucleotide residues shown in SEQ ID | |
| | NO:219, and where b is greater than or equal to a +14. | |
| 828857 | Preferably excluded from the present invention are one or more | H87149, N29514, N32038, W49771, W69834, W69944, W69906, |
| | polynucleotides comprising a nucleotide sequence described by the | W70171, AA035645, AA262486, AA280793, AA280787, |
| | general formula of a-b, where a is any integer between 1 to 1296 of | AA468735, AA470769, AA814845, AA877855, AA903806 |
| | SEQ ID NO:220, b is an integer of 15 to 1310, where both a and b | |
| | correspond to the positions of nucleotide residues shown in SEQ ID | |
| | NO:220, and where b is greater than or equal to a +14. | |
| 828861 | Preferably excluded from the present invention are one or more | |
| | polynucleotides comprising a nucleotide sequence described by the | |
| | general formula of a-b, where a is any integer between 1 to 1355 of | |
| | SEQ ID NO:221, b is an integer of 15 to 1369, where both a and b | |
| | correspond to the positions of nucleotide residues shown in SEQ ID | |
| | NO:221, and where b is greater than or equal to a +14. | |
| 828866 | Preferably excluded from the present invention are one or more | R17863, H06471, AA157721 |
| | polynucleotides comprising a nucleotide sequence described by the | |
| | general formula of a-b, where a is any integer between 1 to 778 of | |
| | SEQ ID NO:222, b is an integer of 15 to 792, where both a and b | |
| | correspond to the positions of nucleotide residues shown in SEQ ID | |
| | NO:222, and where b is greater than or equal to a +14. | |
| 828872 | Preferably excluded from the present invention are one or more | R87888, R87900, R87908, N49168, AA931266 |
| | polynucleotides comprising a nucleotide sequence described by the | |
| | general formula of a-b, where a is any integer between 1 to 907 of | |
| | SEQ ID NO:223, b is an integer of 15 to 921, where both a and b | |
| | correspond to the positions of nucleotide residues shown in SEQ ID | |
| | NO:223, and wbere b is greater than or equal to a +14. | |
| 828874 | Preferably excluded from the present invention are one or more | T87038, R70347, H39025, R91475, H57830, H59954, H62220, |
| | polynucleotides comprising a nucleotide sequence described by the | H62316, H65258, H65259, H95743, N54406, W25201, W32973, |
| | general formula of a-b, where a is any integer between 1 to 1965 of | W69360, W69399, W84707, W90181, AA045489, AA058908, |
| | SEQ ID NO:224, b is an integer of 15 to 1979, where both a and b | AA059484, AA126289, AA126390, AA127568, AA171412, |
| | correspond to the positions of nucleotide residues shown in SEQ ID | AA171832, AA548030, AA593288, AA595330, AA62 |
| | NO:224, and where b is greater than or equal to a +14. | AA573531, AA574415, AA865443 |
| 828875 | Preferably excluded from the present invention are one or more | |
| | polynucleotides comprising a nucleotide sequence described by the | |
| | general formula of a-b, where a is any integer between 1 to 527 of | |
| | SEQ ID NO:225, b is an integer of 15 to 541, where both a and b | |
| | correspond to the positions of nucleotide residues shown in SEQ ID | |
| | NO:225, and where b is greater than or equal to a +14. | |
| 828877 | Preferably excluded from the present invention are one or more | |
| | polynucleotides comprising a nucleotide sequence described by the | |
| | general formula of a-b, where a is any integer between 1 to 263 of | |
| | SEQ ID NO:226, b is an integer of 15 to 277, where both a and b | |
| | correspond to the positions of nucleotide residues shown in SEQ ID | |
| | NO:226, and where b is greater than or equal to a +14. | |
| 828878 | Preferably excluded from the present invention are one or more | T66330, R26894, R27126, R69123, R69242, R82299, R82300, |
| | polynucleotides comprising a nucleotide sequence described by the | W07548, W40127, W61081, W63740, AA088736, AA088851, |
| | general formula of a-b, where a is any integer between ito 2055 of | AA416637, AA425692, AA587736, AA574419, AA659481, |
| | SEQ ID NO:227, b is an integer of 15 to 2069, where both a and b | AA746137, AA827964, AA873416, AA876962, AA886118, |
| | correspond to the positions of nucleotide residues shown in SEQ ID | AA913307, W63541, AA091722 |
| | NO:227, and where b is greater than or equal to a +14. | |
| 828879 | Preferably excluded from the present invention are one or more | |
| | polynucleotides comprising a nucleotide sequence described by the | |
| | general formula of a-b, where a is any integer between 1 to 457 of | |
| | SEQ ID NO:228, b is an integer of 15 to 471, where both a and b | |
| | correspond to the positions of nucleotide residues shown in SEQ ID | |
| | NO:228, and where b is greater than or equal to a +14. | |
| 828881 | Preferably excluded from the present invention are one or more | |
| | polynucleotides comprising a nucleotide sequence described by the | |
| | general formula of a-b, where a is any integer between 1 to 1626 of | |
| | SEQ ID NO:229, b is an integer of 15 to 1640, where both a and b | |
| | correspond to the positions of nucleotide residues shown in SEQ ID | |
| | NO:229, and where b is greater than or equal to a +14. | |
| 828885 | Preferably excluded from the present invention are one or more | T66265, R00322, R05577, R14288, R40578, N35835, W67698, |
| | polynucleotides comprising a nucleotide sequence described by the | W68707, AA226782, AA227401, AA917573, AI096970, C01407 |
| | general formula of a-b, where a is any integer between 1 to 1956 of | |
| | SEQ ID NO:230, b is an integer of 15 to 1970, where both a and b | |
| | correspond to the positions of nucleotide residues shown in SEQ ID | |
| | NO:230, and where b is greater than or equal to a +14. | |
| 828886 | Preferably excluded from the present invention are one or more | |
| | polynucleotides comprising a nucleotide sequence described by the | |
| | general formula of a-b, where a is any integer between 1 to 296 of | |
| | SEQ ID NO:231, b is an integer of 15 to 310, where both a and b | |
| | correspond to the positions of nucleotide residues shown in SEQ ID | |
| | NO:231, and where b is greater than or equal to a +14, | |
| 828887 | Preferably excluded from the present invention are one or more | |
| | polynucleotides comprising a nucleotide sequence described by the | |
| | general formula of a-b, where a is any integer between 1 to 2819 of | |
| | SEQ ID NO:232, b is an integer of 15 to 2833, where both a and b | |
| | correspond to the positions of nucleotide residues shown in SEQ ID | |
| | NO:232, and where b is greater than or equal to a +14. | |
| 828889 | Preferably excluded from the present invention are one or more | AI084904, N87764 |
| | polynucleotides comprising a nucleotide sequence described by the | |
| | general formula of a-b, where a is any integer between 1 to 678 of | |
| | SEQ ID NO:233, b is an integer of 15 to 692, where both a and b | |
| | correspond to the positions of nucleotide residues shown in SEQ ID | |
| | NO:233, and where b is greater than or equal to a +14. | |
| 828891 | Preferably excluded from the present invention are one or more | |
| | polynucleotides comprising a nucleotide sequence described by the | |
| | general formula of a-b, where a is any integer between 1 to 1339 of | |
| | SEQ ID NO:234, b is an integer of 15 to 1353, where both a and b | |
| | correspond to the positions of nucleotide residues shown in SEQ ID | |
| | NO:234, and where b is greater than or equal to a +14. | |
| 828899 | Preferably excluded from the present invention are one or more | |
| | polynucleotides comprising a nucleotide sequence described by the | |
| | general formula of a-b, where a is any integer between 1 to 332 of | |
| | SEQ ID NO:235, b is an integer of 15 to 346, where both a and b | |
| | correspond to the positions of nucleotide residues shown in SEQ ID | |
| | NO:235, and where b is greater than or equal to a +14. | |
| 828907 | Preferably excluded from the present invention are one or more | |
| | polynucleotides comprising a nucleotide sequence described by the | |
| | general formula of a-b, where a is any integer between 1 to 2257 of | |
| | SEQ ID NO:236, b is an integer of 15 to 2271, where both a and b | |
| | correspond to the positions of nucleotide residues shown in SEQ ID | |
| | NO:236, and where b is greater than or equal to a +14. | |
| 828911 | Preferably excluded from the present invention are one or more | |
| | polynucleotides comprising a nucleotide sequence described by the | |
| | general formula of a-b, where a is any integer between 1 to 3036 of | |
| | SEQ ID NO:237, b is an integer of 15 to 3050, where both a and b | |
| | correspond to the positions of nucleotide residues shown in SEQ ID | |
| | NO:237, and where b is greater than or equal to a +14. | |
| 828914 | Preferably excluded from the present invention are one or more | |
| | polynucleotides comprising a nucleotide sequence described by the | |
| | general formula of a-b, where a is any integer between 1 to 2788 of | |
| | SEQ ID NO:238, b is an integer of 15 to 2802, where both a and b | |
| | correspond to the positions of nucleotide residues shown in SEQ ID | |
| | NO:238, and where b is greater than or equal to a +14. | |
| 828917 | Preferably excluded from the present invention are one or more | T48789, T48790, T52689, T52690, T54143, T57627, T58981, |
| | polynucleotides comprising a nucleotide sequence described by the | T60334, T63023, T63169, T64611, T68165, T73770, T92858, |
| | general formula of a-b, where a is any integer between 1 to 1523 of | R09683, R05784, R05870, R23705, R24243, R25436, R26263, |
| | SEQ ID NO:239, b is an integer of 15 to 1537, where both a and b | R26661, R31482, R33617, R52663, R54888, R55790, R63634, |
| | correspond to the positions of nucleotide residues shown in SEQ ID | R64491, R65588, R66756, R74348, R74447, R77767, R77861, |
| | NO:239, and where b is greater than or equal to a +14. | H24648, H24647, H25483, H25708, H25719, H30170, H39683, |
| | | H42201, H50627, H61272, H74187, H73366, H84457, H96852, |
| | | H97161, N21258, N24067, N25124, N25891, N32256, N35943, |
| | | N39665, N59887, N74237, N75946, N77028, N91815, N94382, |
| | | W01241, W04970, W16791, W31249, W37991, W42625, |
| | | W42503, W42504, W45097, W46997, W47010, W47011, |
| | | W47035, W58226, W60191, W74239, AA011342, AA011422, |
| | | AA053421, AA053142, AA069730, AA069687, AA071401, |
| | | AA079362, AA085841, AA088476, AA088867, AA099339, |
| | | AA111899, AA112344, AA128689, AA128504, AA130068, |
| | | AA130069, AA133988, AA130205, AA134388, AA130699, |
| | | AA131164, AA131119, AA135908, AA143614, AA148147, |
| | | AA151655, AA151855, AA149710, AA150148, AA152217, |
| | | AA150454, AA156656, AA156942, AA158064, AA158065, |
| | | AA160927, AA167640, AA167760, AA173558, AA173723, |
| | | AA188571, AA188806, AA188862, AA190996, AA191121, |
| | | AA252461, AA286842, AA513431, AA523544, AA533369, |
| | | AA534903, AA541751, AA548088, AA552311, AA563748, |
| | | AA563790, AA564990, AA565005, AA588690, AA594295, |
| | | AA600956, AA604061, AA604282, AA604810, AA614124, |
| | | AA631612, AA632221, AA569331, AA573854, AA577627, |
| | | AA579851, AA661566, AA689517, AA740358, AA740572, |
| | | AA747358, AA768322, AA827032, AA831321, AA831490, |
| | | AA862010, AA862071, AA872486, AA876655, AA878041, |
| | | AA902900, AA907481, AA932203, AA976947, AA995848, |
| | | AI005047, AI081152, AI053717, AI053913, AI053985, AI054236, |
| | | F18795, D82560, W28635, W68223, C02865, C05961, C06214, |
| | | C14019, AA641827, AA642221 |
| 828921 | Preferably excluded from the present invention are one or more | |
| | polynucleotides comprising a nucleotide sequence described by the | |
| | general formula of a-b, where a is any integer between 1 to 1320 of | |
| | SEQ ID NO:240, b is an integer of 15 to 1334, where both a and b | |
| | correspond to the positions of nucleotide residues shown in SEQ ID | |
| | NO:240, and where b is greater than or equal to a +14. | |
| 828922 | Preferably excluded from the present invention are one or more | R14071, R40196, R40196, W78082, AA002041, AA001835, |
| | polynucleotides comprising a nucleotide sequence described by the | AA167058, AA564814, AA604562, AA831678, AA902298, |
| | general formula of a-b, where a is any integer between 1 to 2424 of | AA922990, N88270 |
| | SEQ ID NO:241, b is an integer of 15 to 2438, where both a and b | |
| | correspond to the positions of nucleotide residues shown in SEQ ID | |
| | NO:241, and where b is greater than or equal to a +14. | |
| 828924 | Preferably excluded from the present invention are one or more | |
| | polynucleotides comprising a nucleotide sequence described by the | |
| | general formula of a-b, where a is any integer between 1 to 125 of | |
| | SEQ ID NO:242, b is an integer of 15 to 139, where both a and b | |
| | correspond to the positions of nucleotide residues shown in SEQ ID | |
| | NO:242, and where b is greater than or equal to a +14. | |
| 828925 | Preferably excluded from the present invention are one or more | |
| | polynucleotides comprising a nucleotide sequence described by the | |
| | general formula of a-b, where a is any integer between 1 to 465 of | |
| | SEQ ID NO:243, b is an integer of 15 to 479, where both a and b | |
| | correspond to the positions of nucleotide residues shown in SEQ ID | |
| | NO:243, and where b is greater than or equal to a +14. | |
| 828926 | Preferably excluded from the present invention are one or more | AA021328, AA165340 |
| | polynucleotides comprising a nucleotide sequence described by the | |
| | general formula of a-b, where a is any integer between 1 to 570 of | |
| | SEQ ID NO:244, b is an integer of 15 to 584, where both a and b | |
| | correspond to the positions of nucleotide residues shown in SEQ ID | |
| | NO:244, and where b is greater than or equal to a +14. | |
| 828928 | Preferably excluded from the present invention are one or more | |
| | polynucleotides comprising a nucleotide sequence described by the | |
| | general formula of a-b, where a is any integer between 1 to 318 of | |
| | SEQ ID NO:245, b is an integer of 15 to 332, where both a and b | |
| | correspond to the positions of nucleotide residues shown in SEQ ID | |
| | NO:245, and where b is greater than or equal to a +14. | |
| 828930 | Preferably excluded from the present invention are one or more | R13197, R22953, R23059, R34735, H16860, H17441, H30722, |
| | polynucleotides comprising a nucleotide sequence described by the | H96486, H98091, N25031, N26040, W37582, W74506, W73933, |
| | general formula of a-b, where a is any integer between 1 to 1603 of | W79218, W79053, AA017108, AA027970, AA027971, |
| | SEQ ID NO:246, b is an integer of 15 to 1617, where both a and b | AA058997, AA223857, AA468648, AA506695, AA513402, |
| | correspond to the positions of nucleotide residues shown in SEQ ID | AA627542, AA627543, AA687974, AA748356, AA749265, |
| | NO:246, and whereb is greater than or equal to a+14. | AA766155, AA769265, AA810698, AA810803, AA811177, |
| | | AA813864, AA815128, AA837374, AA907206, AA907432, |
| | | AA911140, AA911319, AA989380, AI088862, N85247 |
| 828935 | Preferably excluded from the present invention are one or more | |
| | polynucleotides comprising a nucleotide sequence described by the | |
| | general formula of a-b, where a is any integer between 1 to 1435 of | |
| | SEQ ID NO:247, b is an integer of 15 to 1449, where both a and b | |
| | correspond to the positions of nucleotide residues shown in SEQ ID | |
| | NO:247, and where b is greater than or equal to a +14. | |
| 828937 | Preferably excluded from the present invention are one or more | T78834, T78835, T99250, T99297, R12511, T26404, R37406, |
| | polynucleotides comprising a nucleotide sequence described by the | R41280, R41370, R41371, R52358, R52359, R41280, R41370, |
| | general formula of a-b, where a is any integer between ito 1470 of | R41371, R81208, R81320, R82778, H44863, H54693, H54584, |
| | SEQ ID NO:248, b is an integer of 15 to 1484, where both a and b | H71670, H72234, H79199, H80064, H80065, H90038, H90715, |
| | correspond to the positions of nucleotide residues shown in SEQ ID | H96868, H96874, H98754, N20017, N21625, N23354, N28826, |
| | NO:248, and where b is greater than or equal to a +14. | N28864, N31950, N33092, N35337, N35930, N36772, N44708, |
| | | N59759, N63774, N64419, N70550, N73583, N75550, N78219, |
| | | N78798, N92686, N93067, W06846, W07226, W32114, W32172, |
| | | W35376, W38996, W39688, W45043, W55883, W55882, |
| | | W58545, W58627, W68228, W78990, W80596, W87464, N91505, |
| | | AA026436, AA062585, AA112289, AA127552, AA127553, |
| | | AA171942, AA172148, AA224492, AA279390, AA505278, |
| | | AA505337, AA527368, AA531405, AA532853, AA534544, |
| | | AA535699, AA582848, AA587609, AA568827, AA635925, |
| | | AA576357, AA576891, AA579716, AA565856, AA687556, |
| | | AA736748, AA877644, AA885760, AA917890, AA918826, |
| | | AA938647, AA953594, AA971036, AA973846, AA976240, |
| | | AA976836, AA948139, A1086410, W01797, N86155, N86407, |
| | | AA026382, AA092135, AA093922, AA094184 |
| 828940 | Preferably excluded from the present invention are one or more | T61139, H60808, H66215, H86154, H86598, N66951, AA045564, |
| | polynucleotides comprising a nucleotide sequence described by the | AA053520, AA054053, AA054010, AA055556, AA055592, |
| | general formula of a-b, where a is any integer between 1 to 2408 of | AA055887, AA085899, AA088546, AA100472, AA102305, |
| | SEQ ID NO:249, b is an integer of 15 to 2422, where both a and b | AA100774, AA115726, AA115790, AA130430, AA130456, |
| | correspond to the positions of nucleotide residues shown in SEQ ID | AA134504, AA130756, AA132265, AA134988, AA135921, |
| | NO:249, and where b is greater than or equal to a +14. | AA143560, AA143592, AA146693, AA146644, AA146790, |
| | | AA152341, AA149726, AA149780, AA152003, AA157705, |
| | | AA157715, AA157718, AA157719, AA157730, AA180379, |
| | | AA226737, AA227302, AA527374, C05254 |
| 828942 | Preferably excluded from the present invention are one or more | H51878 |
| | polynucleotides comprising a nucleotide sequence described by the | |
| | general formula of a-b, where a is any integer between 1 to 560 of | |
| | SEQ ID NO:250, b is an integer of 15 to 574, where both a and b | |
| | correspond to the positions of nucleotide residues shown in SEQ ID | |
| | NO:250, and where b is greater than or equal to a +14. | |
| 828943 | Preferably excluded from the present invention are one or more | |
| | polynucleotides comprising a nucleotide sequence described by the | |
| | general formula of a-b, where a is any integer between 1 to 1030 of | |
| | SEQ ID NO:251, b is an integer of 15 to 1044, where both a and b | |
| | correspond to the positions of nucleotide residues shown in SEQ ID | |
| | NO:251, and where b is greater than or equal to a +14. | |
| 828946 | Preferably excluded from the present invention are one or more | H49140, H50139, N91808, W17361, W23877, W25195, W31242, |
| | polynucleotides comprising a nucleotide sequence described by the | AA1 16089, AAl 16090, AA150544, AA150853, AA417973, |
| | general formula of a-b, where a is any integer between ito 1015 of | AA418133, AA279993, AA280052, AA583751, AA587199, |
| | SEQ ID NO:252, b is an integer of 15 to 1029, where both a and b | AA618421, AA814427, AA830028, AA916097, AA961686, |
| | correspond to the positions of nucleotide residues shown in SEQ ID | AA974254, AA987758, AI083878, AI085516, N94820, N95456 |
| | NO:252, and where b is greater than or equal to a +14. | |
| 828947 | Preferably excluded from the present invention are one or more | |
| | polynucleotides comprising a nucleotide sequence described by the | |
| | general formula of a-b, where a is any integer between 1 to 461 of | |
| | SEQ ID NO:253, b is an integer of 15 to 475, where both a and b | |
| | correspond to the positions of nucleotide residues shown in SEQ ID | |
| | NO:253, and where b is greater than or equal to a +14. | |
| 828956 | referably excluded from the present invention are one or more | T80047, T80393, H22804, N33236, W55892, AA043830, |
| | polynucleotides comprising a nucleotide sequence described by the | AA062632, AA069280, AA078770, AA082403, AA101062, |
| | general formula of a-b, where a is any integer between ito 1710 of | AA459984, AA460077, AA501353, AA535081, AA588749, |
| | SEQ ID NO:254, b is an integer of 15 to 1724, where both a and b | AA577376, AA814781, AA836428, AA876439, AA9 16459, |
| | correspond to the positions of nucleotide residues shown in SEQ ID | AA938494 |
| | NO:254, and where b is greater than or equal to a +14. | |
| 828958 | Preferably excluded from the present invention are one or more | |
| | polynucleotides comprising a nucleotide sequence described by the | |
| | general formula of a-b, where a is any integer between 1 to 292 of | |
| | SEQ ID NO:255, b is an integer of 15 to 306, where both a and b | |
| | correspond to the positions of nucleotide residues shown in SEQ ID | |
| | NO:255, and where b is greater than or equal to a +14. | |
| 828965 | Preferably excluded from the present invention are one or more | T60299, R07493, R02543, R02660, N23126, N26234, N28744, |
| | polynucleotides comprising a nucleotide sequence described by the | N80029, N92370, W06992, W24565, W56160, AA058766, |
| | general formula of a-b, where a is any integer between ito 876 of | AA082121, AA102497, AA133193, AA157043, AA181057, |
| | SEQ ID NO:256, b is an integer of 15 to 890, where both a and b | AA459909, AA419349, AA428256, AA522732, AA531204, |
| | correspond to the positions of nucleotide residues shown in SEQ ID | AA588687, AA622529, AA631698, AA687351, AA736613, |
| | NO:256, and where b is greater than or equal to a +14. | AA736615, AA743076, AA805965, AA825789, AA873396, |
| | | AA934548, AA984002 |
| 828969 | Preferably excluded from the present invention are one or more | R34277, R35477, R40127, R40127, R56401, R63536, R63587, |
| | polynucleotides comprising a nucleotide sequence described by the | R68336, R68415, R68416, R68428, R68429, R72408, R72447, |
| | general formula of a-b, where a is any integer between ito 1145 of | 75996, R76825, H00671, H00761, H00909, H00910, H06173, |
| | SEQ ID NO:257, b is an integer of 15 to 1159, where both a and b | H06437, H67367, H67416, H95558, N21675, N22870, N27226, |
| | correspond to the positions of nucleotide residues shown in SEQ ID | N30906, N34567, N56770, N62120, N72850, N91825, W03069, |
| | NO:257, and where b is greater than or equal to a +14. | N31262, W70204, W75946, AA009777, AA009498, AA081398, |
| | | AA081947, AA082173, AA082577, AA101142, AA102573, |
| | | AA102587, AA159158, AA279295, AA279321, AA587132, |
| | | AA576939, AA720862, AA748173, AA808533, AA878214, |
| | | AA962702, AA987447, AA987635, AA989319, AA995406, |
| | | AI031632, N84444, AI097592, C02910, C14651, AA081397, |
| | | C15440 |
| 828971 | Preferably excluded from the present invention are one or more | |
| | polynucleotides comprising a nucleotide sequence described by the | |
| | general formula of a-b, where a is any integer between 1 to 741 of | |
| | SEQ ID NO:258, b is an integer of 15 to 755, where both a and b | |
| | correspond to the positions of nucleotide residues shown in SEQ ID | |
| | NO:258, and where b is greater than or equal to a +14. | |
| 828973 | Preferably excluded from the present invention are one or more | |
| | polynucleotides comprising a nucleotide sequence described by the | |
| | general formula of a-b, where a is any integer between 1 to 700 of | |
| | SEQ ID NO:259, b is an integer of 15 to 714, where both a and b | |
| | correspond to the positions of nucleotide residues shown in SEQ ID | |
| | NO:259, and where b is greater than or equal to a +14. | |
| 828980 | Preferably excluded from the present invention are one or more | AA171806, AA223318 |
| | polynucleotides comprising a nucleotide sequence described by the | |
| | general formula of a-b, where a is any integer between 1 to 511 of | |
| | SEQ ID NO:260, b is an integer of 15 to 525, where both a and b | |
| | correspond to the positions of nucleotide residues shown in SEQ ID | |
| | NO:260, and where b is greater than or equal to a +14. | |
| 828984 | Preferably excluded from the present invention are one or more | T80804, T81207, R66564, R79533, H10212, H10266, N47700, |
| | polynucleotides comprising a nucleotide sequence described by the | N47701, N47714, N47715, W92453, W92454, AA047175, |
| | general formula of a-b, where a is any integer between 1 to 2986 of | AA057046, AA084865, AA084994, AA085435, AA088 196, |
| | SEQ ID NO:261, b is an integer of 15 to 3000, where both a and h | AA088369, AA102606, AA102637, AA102681, AA129398, |
| | correspond to the positions of nucleotide residues shown in SEQ ID | AA129437, AA133824, AA133835, AA134870, AA155636, |
| | NO:261, and where b is greater than or equal to a +14. | AA155692, AA173150, AA173277, AA181676, AA172185, |
| | | AA187844, AA188417, AA188720, AA203343, AA223606, |
| | | AA223765, AA232539, AA253486, AA258817, AA258912, |
| | | AA418911, AA426576, AA428207, AA282012, AA282185, |
| | | AA506517, AA581113, AA640599, AA864428, AA872063, |
| | | AA928645, AA947052, AA983384, W28603, AA640958 |
| 828985 | Preferably excluded from the present invention are one or more | |
| | polynucleotides comprising a nucleotide sequence described by the | |
| | general formula of a-b, where a is any integer between 1 to 952 of | |
| | SEQ ID NO:262, b is an integer of 15 to 966, where both a and b | |
| | correspond to the positions of nucleotide residues shown in SEQ ID | |
| | NO:262, and where b is greater than or equal to a +14. | |
| 828988 | Preferably excluded from the present invention are one or more | T73414, R12106, T66627, T66628, T78284, R16041, R16042, |
| | polynucleotides comprising a nucleotide sequence described by the | R36860, R37936, R61426, R63310, H40110, H40174, N25567, |
| | general formula of a-b, where a is any integer between 1 to 2724 of | N30486, N34167, N44865, N52758, N57579, N68031, W04668, |
| | SEQ ID NO:263, b is an integer of 15 to 2738, where both a and b | W31769, W32476, W32662, AA029481, AA029545, AA2 15402, |
| | correspond to the positions of nucleotide residues shown in SEQ ID | AA278628, AA278627, AA282001, AA483843, AA576431, |
| | NO:263, and where b is greater than or equal to a +14. | AA659932, AA749063, AA768638, AA768824, AA809759, |
| | | AA830249, N83750, AI097104 |
| 828993 | Preferably excluded from the present invention are one or more | |
| | polynucleotides comprising a nucleotide sequence described by the | |
| | general formula of a-b, where a is any integer between 1 to 1506 of | |
| | SEQ ID NO:264, b is an integer of 15 to 1520, where both a and b | |
| | correspond to the positions of nucleotide residues shown in SEQ ID | |
| | NO:264, and where b is greater than or equal to a +14. | |
| 828995 | Preferably excluded from the present invention are one or more | |
| | polynucleotides comprising a nucleotide sequence described by the | |
| | general formula of a-b, where a is any integer between 1 to 1554 of | |
| | SEQ ID NO:265, b is an integer of 15 to 1568, where both a and b | |
| | correspond to the positions of nucleotide residues shown in SEQ ID | |
| | NO:265, and where b is greater than or equal to a +14. | |
| 829000 | Preferably excluded from the present invention are one or more | T84984, H62305, N94075 |
| | polynucleotides comprising a nucleotide sequence described by the | |
| | general formula of a-b, where a is any integer between 1 to 531 of | |
| | SEQ ID NO:266, b is an integer of 15 to 545, where both a and b | |
| | correspond to the positions of nucleotide residues shown in SEQ ID | |
| | NO:266, and where b is greater than or equal to a +14. | |
| 829005 | Preferably excluded from the present invention are one or more | T81847, R31803, R63658, H80178, AA086064, AA730231, |
| | polynucleotides comprising a nucleotide sequence described by the | AA805602, N84214, AA091994 |
| | general formula of a-b, where a is any integer between 1 to 748 of | |
| | SEQ ID NO:267, b is an integer of 15 to 762, where both a and b | |
| | correspond to the positions of nucleotide residues shown in SEQ ID | |
| | NO:267, and where b is greater than or equal to a +14. | |
| 829009 | Preferably excluded from the present invention are one or more | |
| | polynucleotides comprising a nucleotide sequence described by the | |
| | general formula of a-b, where a is any integer between 1 to 1419 of | |
| | SEQ ID NO:268, b is an integer of 15 to 1433, where both a and b | |
| | correspond to the positions of nucleotide residues shown in SEQ ID | |
| | NO:268, and where b is greater than or equal to a +14. | |
| 829010 | Preferably excluded from the present invention are one or more | |
| | polynucleotides comprising a nucleotide sequence described by the | |
| | general formula of a-b, where a is any integer between 1 to 2264 of | |
| | SEQ ID NO:269, b is an integer of 15 to 2278, where both a and b | |
| | correspond to the positions of nucleotide residues shown in SEQ ID | |
| | NO:269, and where b is greater than or equal to a +14. | |
| 829012 | referably excluded from the present invention are one or more | T46984, T46985, T60315, T60340, T91262, T82866, T85699, |
| | polynucleotides comprising a nucleotide sequence described by the | R18936, R22449, R22501, R44051, R44051, R62350, R62351, |
| | general formula of a-b, where a is any integer between ito 2519 of | R62967, R63021, R67538, R67539, H00265, H00266, H05754, |
| | SEQ ID NO:270, b is an integer of 15 to 2533, where both a and b | H05861, H17661, H17778, H37895, R84704, R85663, R85705, |
| | correspond to the positions of nucleotide residues shown in SEQ ID | H92774, H71754, H86241, H86596, N77995, N94481, W23930, |
| | NO:270, and where b is greater than or equal to a +14. | W33005, W42716, W42804, W42856, W42911, W48687, |
| | | W48688, W51894, W60144, AA013165, AA013166, AA016027, |
| | | AA016116, AA019160, AA019173, AA019737, AA019781, |
| | | AA019874, AA019940, AA020855, AA021014, AA039946, |
| | | AA039812, AA044966, AA059316, AA059332, AA062810, |
| | | AA069688, AA074166, AA074690, AA074819, AA079227, |
| | | AA086267, AA085941, AA101899, AA111855, AA112207, |
| | | AA112317, AA113083, AA113110, AA112379, AA128454, |
| | | AA129184, AA134373, AA134374, AA147440, AA147441, |
| | | AA147468, AA147469, AA152007, AA182029, AA188388, |
| | | AA193685, AA514744, AA525480, AA553895, AA559119, |
| | | AA580724, AA595036, AA600916, AA601895, AA602350, |
| | | AA631450, AA633022, AA640333, AA580604, AA715813, |
| | | AA806865, AA808711, AA811858, AA833843, AA862552, |
| | | AA876869, AA878958, AA887089, AA918330, AA922879, |
| | | AA937320, AA977779, AA987809, AA991856, AA999930, |
| | | AI081179, W28427, N86448, AA640960, AA641152 |
| 829013 | Peferably excluded from the present invention are one or more | R12986, R32825, R32839, R32927, R32942, R40183, R52946, |
| | polynucleotides comprising a nucleotide sequence described by the | R3730, R40183, R66041, H98989, N52010, N54624, N66635, |
| | general formula of a-b, where a is any integer between 1 to 1604 of | AA046243, AA149949, AA253362, AA253485, AA258773, |
| | SEQ ID NO:271, b is an integer of 15 to 1618, where both a and b | AA257971, AA262281, AA422167, AA262911, AA513150, |
| | correspond to the positions of nucleotide residues shown in SEQ ID | AA687117, AA687257, AA747442, AA748820, AA749108, |
| | NO:271, and where b is greater than or equal to a +14. | AA767245, AA806305, AA811958, AA903407, AA937560, |
| | | AA938330, AA976840, AA094074 |
| 829019 | Preferably excluded from the present invention are one or more | |
| | polynucleotides comprising a nucleotide sequence described by the | |
| | general formula of a-b, where a is any integer between 1 to 456 of | |
| | SEQ ID NO:272, b is an integer of 15 to 470, where both a and b | |
| | correspond to the positions of nucleotide residues shown in SEQ ID | |
| | NO:272, and where b is greater than or equal to a +14. | |
| 829020 | Preferably excluded from the present invention are one or more | AA136693, AA136791, AA233217, AA419607 |
| | polynucleotides comprising a nucleotide sequence described by the | |
| | general formula of a-b, where a is any integer between 1 to 969 of | |
| | SEQ ID NO:273, b is an integer of 15 to 983, where both a and b | |
| | correspond to the positions of nucleotide residues shown in SEQ ID | |
| | NO:273, and where b is greater than or equal to a +14. | |
| 829021 | Preferably excluded from the present invention are one or more | T94357, T94712, R12024, R12980, R37092, R40178, R40178, |
| | polynucleotides comprising a nucleotide sequence described by the | H06066, H13404, N70651, W06945, N90742, AA071520, |
| | general formula of a-b, where a is any integer between ito 1992 of | AA082342, AA086292, AA111847, AA508760, AA513083, |
| | SEQ ID NO:274, b is an integer of 15 to 2006, where both a and b | AA513134, AA975983, AA987297, N86943 |
| | correspond to the positions of nucleotide residues shown in SEQ ID | |
| | NO:274, and where b is greater than or equal to a +14. | |
| 829026 | Preferably excluded from the present invention are one or more | R46780, R56425, H4131, H4048, H9990, H44884, W73060, |
| | polynucleotides comprising a nucleotide sequence described by the | W76648, AA258220, AA732283, AA732519, AA748619, |
| | general formula of a-b, where a is any integer between 1 to 1362 of | AA768036, AA830813 |
| | SEQ ID NO:275, b is an integer of 15 to 1376, where both a and b | |
| | correspond to the positions of nucleotide residues shown in SEQ ID | |
| | NO:275, and where b is greater than or equal to a +14. | |
| 829030 | Preferably excluded from the present invention are one or more | |
| | polynucleotides comprising a nucleotide sequence described by the | |
| | general formula of a-b, where a is any integer between 1 to 2580 of | |
| | SEQ ID NO:276, b is an integer of 15 to 2594, where both a and b | |
| | correspond to the positions of nucleotide residues shown in SEQ ID | |
| | NO:276, and where b is greater than or equal to a +14. | |
| 829035 | Preferably excluded from the present invention are one or more | |
| | polynucleotides comprising a nucleotide sequence described by the | |
| | general formula of a-b, where a is any integer between 1 to 665 of | |
| | SEQ ID NO:277, b is an integer of 15 to 679, where both a and b | |
| | correspond to the positions of nucleotide residues shown in SEQ ID | |
| | NO:277, and where b is greater than or equal to a +14. | |
| 829041 | Preferably excluded from the present invention are one or more | T64828, R13411, R40922, H17358, AA829407, AA991316 |
| | polynucleotides comprising a nucleotide sequence described by the | |
| | general formula of a-b, where a is any integer between 1 to 1464 of | |
| | SEQ ID NO:278, b is an integer of 15 to 1478, where both a and b | |
| | correspond to the positions of nucleotide residues shown in SEQ ID | |
| | NO:278, and where b is greater than or equal to a +14. | |
| 829045 | Preferably excluded from the present invention are one or more | R94934, R95018, R96941, R96998, N62469, N79188, AA056180, |
| | polynucleotides comprising a nucleotide sequence described by the | AA079122, AA079223, AA190398, AA190542, AA279989, |
| | general formula of a-b, where a is any integer between 1 to 2307 of | AA280050, AA563719, AA563967, AA621823, AA639374, |
| | SEQ ID NO:279, b is an integer of 15 to 2321, where both a and b | AA743441, AA809943, AA903777, AA991450, AA091152 |
| | correspond to the positions of nucleotide residues shown in SEQ ID | |
| | NO:279, and where b is greater than or equal to a +14. | |
| 829048 | Preferably excluded from the present invention are one or more | |
| | polynucleotides comprising a nucleotide sequence described by the | |
| | general formula of a-b, where a is any integer between 1 to 1679 of | |
| | SEQ ID NO:280, b is an integer of 15 to 1693, where both a and b | |
| | correspond to the positions of nucleotide residues shown in SEQ ID | |
| | NO:280, and where b is greater than or equal to a +14. | |
| 829051 | Preferably excluded from the present invention are one or more | |
| | polynucleotides comprising a nucleotide sequence described by the | |
| | general formula of a-b, where a is any integer between 1 to 244 of | |
| | SEQ ID NO:281, b is an integer of 15 to 258, where both a and b | |
| | correspond to the positions of nucleotide residues shown in SEQ ID | |
| | NO:281, and where b is greater than or equal to a +14. | |
| 829052 | Preferably excluded from the present invention are one or more | T54099, 154192, R42585, R42585, H30486, R83722, N24879, |
| | polynucleotides comprising a nucleotide sequence described by the | N34365, N36398, W80812, W80905, AA040726, AA040725, |
| | general formula of a-b, where a is any integer between 1 to 1750 of | AA069816, AA099148, AA099246, AA130358, AA131274, |
| | SEQ ID NO:282, his an integer of 15 to 1764, where both a and b | AA143111, AA150578, AA553644, H89452, AA570403, |
| | correspond to the positions of nucleotide residues shown in SEQ ID | AA985591, AI076032, AA092873 |
| | NO:282, and where b is greater than or equal to a +14. | |
| 829057 | Preferably excluded from the present invention are one or more | R17092 |
| | polynucleotides comprising a nucleotide sequence described by the | |
| | general formula of a-b, where a is any integer between 1 to 785 of | |
| | SEQ ID NO:283, b is an integer of 15 to 799, where both a and b | |
| | correspond to the positions of nucleotide residues shown in SEQ ID | |
| | NO:283, and where b is greater than or equal to a +14. | |
| 829058 | Preferably excluded from the present invention are one or more | |
| | polynucleotides comprising a nucleotide sequence described by the | |
| | general formula of a-b, where a is any integer between 1 to 1475 of | |
| | SEQ ID NO:284, b is an integer of 15 to 1489, where both a and b | |
| | correspond to the positions of nucleotide residues shown in SEQ ID | |
| | NO:284, and where b is greater than or equal to a +14. | |
| 829059 | Preferably excluded from the present invention are one or more | T99023, R54176, H73053, H72832, H73054, H80706, AA988806 |
| | polynucleotides comprising a nucleotide sequence described by the | |
| | general formula of a-b, where a is any integer between 1 to 688 of | |
| | SEQ ID NO:285, b is an integer of 15 to 702, where both a and b | |
| | correspond to the positions of nucleotide residues shown in SEQ ID | |
| | NO:285, and where b is greater than or equal to a +14. | |
| 829061 | Preferably excluded from the present invention are one or more | |
| | polynucleotides comprising a nucleotide sequence described by the | |
| | general formula of a-b, where a is any integer between 1 to 1161 of | |
| | SEQ ID NO:286, b is an integer of 15 to 1175, where both a and b | |
| | correspond to the positions of nucleotide residues shown in SEQ ID | |
| | NO:286, and where b is greater than or equal to a +14. | |
| 829062 | Preferably excluded from the present invention are one or more | |
| | polynucleotides comprising a nucleotide sequence described by the | |
| | general formula of a-b, where a is any integer between 1 to 2859 of | |
| | SEQ ID NO:287, b is an integer of 15 to 2873, where both a and b | |
| | correspond to the positions of nucleotide residues shown in SEQ ID | |
| | NO:287, and where b is greater than or equal to a +14. | |
| 829063 | Preferably excluded from the present invention are one or more | T56853, R13426, R40938, R40938, R56447, H64343, W94129, |
| | polynucleotides comprising a nucleotide sequence described by the | W94024, W95653, W95654, AA001812, AA158586, AA158585, |
| | general formula of a-b, where a is any integer between 1 to 2090 of | AA179917, AA463947, AA464082, AA421875, AA430503, |
| | SEQ ID NO:288, b is an integer of 15 to 2104, where both a and b AA430622, AA228990, AA506167, AA528459, AA551350, | |
| | correspond to the positions of nucleotide residues shown in SEQ ID | AA564494, AA601544, AA604335, AA622270, AA747745, |
| | NO:288, and where b is greater than or equal to a +14. | AA760947, AA827325, AA888125, AA910238 |
| 829064 | Preferably excluded from the present invention are one or more | |
| | polynucleotides comprising a nucleotide sequence described by the | |
| | general formula of a-b, where a is any integer between 1 to 1237 of | |
| | SEQ ID NO:289, b is an integer of 15 to 1251, where both a and b | |
| | correspond to the positions of nucleotide residues shown in SEQ ID | |
| | NO:289, and where b is greater than or equal to a +14. | |
| 829066 | Preferably excluded from the present invention are one or more | |
| | polynucleotides comprising a nucleotide sequence described by the | |
| | general formula of a-b, where a is any integer between 1 to 1577 of | |
| | SEQ ID NO:290, b is an integer of 15 to 1591, where both a and b | |
| | correspond to the positions of nucleotide residues shown in SEQ ID | |
| | NO:290, and where b is greater than or equal to a +14. | |
| 829068 | Preferably excluded from the present invention are one or more | |
| | polynucleotides comprising a nucleotide sequence described by the | |
| | general formula of a-b, where a is any integer between 1 to 2372 of | |
| | SEQ ID NO:291, b is an integer of 15 to 2386, where both a and b | |
| | correspond to the positions of nucleotide residues shown in SEQ ID | |
| | NO:291, and where b is greater than or equal to a +14. | |
| 829069 | Preferably excluded from the present invention are one or more | AA056484, AA056650, AA742863 |
| | polynucleotides comprising a nucleotide sequence described by the | |
| | general formula of a-b, where a is any integer between 1 to 969 of | |
| | SEQ ID NO:292, b is an integer of 15 to 983, where both a and b | |
| | correspond to the positions of nucleotide residues shown in SEQ ID | |
| | NO:292, and where b is greater than or equal to a +14. | |
| 829074 | Preferably excluded from the present invention are one or more | R21643, R21965, R23012, R31285, R31896, R32700, R32701, |
| | polynucleotides comprising a nucleotide sequence described by the | R34083, R62210, R64591, R68873, R73888, R73975, R74184, |
| | general formula of a-b, where a is any integer between 1 to 2641 of | R74270, R76839, R77200, R77720, R78052, H03147, H03956, |
| | SEQ ID NO:293, b is an integerof 15 to 2655, where both a and b | H5807, H6106, H39711, H39732, H42156, R98951, N41769, |
| | correspond to the positions of nucleotide residues shown in SEQ ID | W87673, AA007438, AA007439, AA013075, AA099593, |
| | NO:293, and where b is greater than or equal to a +14. | AA156625, AA195656, AA195769, AA236849, AA237048, |
| | | AA226078, AA526030, AA570236, AA570252, AA766062, |
| | | AA767497, AA769581, AA827847, AA831416, AA911414, |
| | | AA938690 |
| 829077 | Preferably excluded from the present invention are one or more | R11694, AA031610, AA056352, AA099809, AA190527 |
| | polynucleotides comprising a nucleotide sequence described by the | |
| | general formula of a-b, where a is any integer between 1 to 1724 of | |
| | SEQ ID NO:294, b is an integer of 15 to 1738, where both a and b | |
| | correspond to the positions of nucleotide residues shown in SEQ ID | |
| | NO:294, and where b is greater than or equal to a +14. | |
| 829078 | Preferably excluded from the present invention are one or more | |
| | polynucleotides comprising a nucleotide sequence described by the | |
| | general formula of a-b, where a is any integer between 1 to 1006 of | |
| | SEQ ID NO:295, b is an integer of 15 to 1020, where both a and b | |
| | correspond to the positions of nucleotide residues shown in SEQ ID | |
| | NO:295, and where b is greater than or equal to a +14. | |
| 829079 | Preferably excluded from the present invention are one or more | AA613454 |
| | polynucleotides comprising a nucleotide sequence described by the | |
| | general formula of a-b, where a is any integer between 1 to 670 of | |
| | SEQ ID NO:296, b is an integer of 15 to 684, where both a and b | |
| | correspond to the positions of nucleotide residues shown in SEQ ID | |
| | NO:296, and where b is greater than or equal to a +14. | |
| 829085 | Preferably excluded from the present invention are one or more | |
| | polynucleotides comprising a nucleotide sequence described by the | |
| | general formula of a-b, where a is any integer between 1 to 1824 of | |
| | SEQ ID NO:297, b is an integer of 15 to 1838, where both a and b | |
| | correspond to the positions of nucleotide residues shown in SEQ ID | |
| | NO:297, and where b is greater than or equal to a +14. | |
| 829093 | Preferably excluded from the present invention are one or more | T86751, N67573, AA084170, AA482701, AA513177, AA715379 |
| | polynucleotides comprising a nucleotide sequence described by the | |
| | general formula of a-b, where a is any integer between 1 to 1621 of | |
| | SEQ ID NO:298, b is an integer of 15 to 1635, where both a and b | |
| | correspond to the positions of nucleotide residues shown in SEQ ID | |
| | NO:298, and where b is greater than or equal to a +14. | |
| 829099 | Preferably excluded from the present invention are one or more | AA235899, AA524874, AA588559, AA568363, C18296 |
| | polynucleotides comprising a nucleotide sequence described by the | |
| | general formula of a-b, where a is any integer between 1 to 854 of | |
| | SEQ ID NO:299, b is an integer of 15 to 868, where both a and b | |
| | correspond to the positions of nucleotide residues shown in SEQ ID | |
| | NO:299, and where b is greater than or equal to a +14. | |
| 829101 | Preferably excluded from the present invention are one or more | N28457 |
| | polynucleotides comprising a nucleotide sequence described by the | |
| | general formula of a-b, where a is any integer between 1 to 533 of | |
| | SEQ ID NO:300, b is an integer of 15 to 547, where both a and b | |
| | correspond to the positions of nucleotide residues shown in SEQ ID | |
| | NO:300, and where b is greater than or equal to a +14. | |
| 829102 | Preferably excluded from the present invention are one or more | N24654, N35441, N72250, W00539, W44692, AA101155, |
| | polynucleotides comprising a nucleotide sequence described by the | AA491668, AI054009, AI054199, W38644 |
| | general formula of a-b, where a is any integer between 1 to 851 of | |
| | SEQ ID NO:301, b is an integer of 15 to 865, where both a and b | |
| | correspond to the positions of nucleotide residues shown in SEQ ID | |
| | NO:301, and where b is greater than or equal to a +14. | |
| 829103 | Preferably excluded from the present invention are one or more | R34801, N36324, D81161, D81435, C15688, C15742 |
| | polynucleotides comprising a nucleotide sequence described by the | |
| | general formula of a-b, where a is any integer between 1 to 801 of | |
| | SEQ ID NO:302, b is an integer of 15 to 815, where both a and b | |
| | correspond to the positions of nucleotide residues shown in SEQ ID | |
| | NO:302, and where b is greater than or equal to a +14. | |
| 829104 | Preferably excluded from the present invention are one or more | R08917, R09023, T95465, R07005, R19551, R37796, R43901, |
| | polynucleotides comprising a nucleotide sequence described by the | R43901, R65802, R65897, R77267, R77316, R82856, R82857, |
| | general formula of a-b, where ais any integer between 1 to 1905 of | H15156, H15216, R93133, H77582, H77583, N45210, N50021, |
| | SEQ ID NO:303, b is anintegerof 15 to 1919, whereboth aand b | N55569, N58316, N59861, N59869, N76954, N77681, N93112, |
| | correspond to the positions of nucleotide residues shown in SEQ ID | W38788, W52631, AA011659, AA011707, AA043405, |
| | NO:303, and where b is greater than or equal to a +14. | AA133302, AA133248, AA134238, AA134239, AA150954, |
| | | AA151044, AA459974, AA460066, AA503364, AA522740, |
| | | AA522866, AA523791, AA602932, AA602716, AA876807, |
| | | AA877039, AA879223, AA923007, AA935208, AA1082642, |
| | | AA1094830 |
| 829109 | Preferably excluded from the present invention are one or more | |
| | polynucleotides comprising a nucleotide sequence described by the | |
| | general formula of a-b, where a is any integer between 1 to 143 of | |
| | SEQ ID NO:304, b is an integer of 15 to 157, where both a and b | |
| | correspond to the positions of nucleotide residues shown in SEQ ID | |
| | NO:304, and where b is greater than or equal to a +14. | |
| 829111 | Preferably excluded from the present invention are one or more | |
| | polynucleotides comprising a nucleotide sequence described by the | |
| | general formula of a-b, where a is any integer between 1 to 329 of | |
| | SEQ ID NO:305, b is an integer of 15 to 343, where both a and b | |
| | correspond to the positions of nucleotide residues shown in SEQ ID | |
| | NO:305, and where b is greater than or equal to a +14. | |
| 829115 | Preferably excluded from the present invention are one or more | AA064674, AA078775 |
| | polynucleotides comprising a nucleotide sequence described by the | |
| | general formula of a-b, where a is any integer between 1 to 682 of | |
| | SEQ ID NO:306, b is an integer of 15 to 696, where both a and b | |
| | correspond to the positions of nucleotide residues shown in SEQ ID | |
| | NO:306, and where b is greater than or equal to a +14. | |
| 829116 | Preferably excluded from the present invention are one or more | |
| | polynucleotides comprising a nucleotide sequence described by the | |
| | general formula of a-b, where a is any integer between 1 to 382 of | |
| | SEQ ID NO:307, b is an integer of 15 to 396, where both a and b | |
| | correspond to the positions of nucleotide residues shown in SEQ ID | |
| | NO:307, and where b is greater than or equal to a +14. | |
| 829119 | Preferably excluded from the present invention are one or more | T51849, T51895, R31503, H89196, W94076, AA233517, |
| | polynucleotides comprising a nucleotide sequence described by the | AA557320, AA582238, AA604556, AA659141 |
| | general formula of a-b, where a is any integer between 1 to 535 of | |
| | SEQ ID NO:308, b is an integer of 15 to 549, where both a and b | |
| | correspond to the positions of nucleotide residues shown in SEQ ID | |
| | NO:308, and where b is greater than or equal to a +14. | |
| 829120 | Preferably excluded from the present invention are one or more | |
| | polynucleotides comprising a nucleotide sequence described by the | |
| | general formula of a-b, where a is any integer between 1 to 1764 of | |
| | SEQ ID NO:309, b is an integer of 15 to 1778, where both a and b | |
| | correspond to the positions of nucleotide residues shown in SEQ ID | |
| | NO:309, and where b is greater than or equal to a +14. | |
| 829121 | Preferably excluded from the present invention are one or more | T79424, T86294, T98674, R00295, R41707, R42706, R45491, |
| | polynucleotides comprising a nucleotide sequence described by the | R46655, R41707, R42706, R45491, R46655, R56768, R71860, |
| | general formula of a-b, where a is any integer between 1 to 757 of | R71861, H17970, N55536, N80100, W46264, W46265, W46263, |
| | SEQ ID NO:310, b is an integer of 15 to 771, where both a and b | W72406, W73710, W76436, AA133997, AA470389, AA514398, |
| | correspond to the positions of nucleotide residues shown in SEQ ID | AA524707, AA536170, F15823, AA731228, AA766110, |
| | NO:310, and where b is greater than or equal to a +14. | AA825368, AA828215, AA833768, AA837103, AA918015, |
| | | AA988068, AA999844, W46262, C04804, AA062584, AA082539 |
| 829123 | Preferably excluded from the present invention are one or more | T53735, T53833, T73419, T79418, T79419, AA035245, |
| | polynucleotides comprising a nucleotide sequence described by the | AA530898, AA588281, AA631068, C01039 |
| | general formula of a-b, where a is any integer between 1 to 1405 of | |
| | SEQ ID NO:311, b is an integer of 15 to 1419, where both a and b | |
| | correspond to the positions of nucleotide residues shown in SEQ ID | |
| | NO:311, and where b is greater than or equal to a +14. | |
| 829126 | Preferably excluded from the present invention are one or more | |
| | polynucleotides comprising a nucleotide sequence described by the | |
| | general formula of a-b, where a is any integer between 1 to 512 of | |
| | SEQ ID NO:312, b is an integer of 15 to 526, where both a and b | |
| | correspond to the positions of nucleotide residues shown in SEQ ID | |
| | NO:312, and where b is greater than or equal to a +14. | |
| 829135 | Preferably excluded from the present invention are one or more | |
| | polynucleotides comprising a nucleotide sequence described by the | |
| | general formula of a-b, where a is any integer between 1 to 2421 of | |
| | SEQ ID NO:313, b is an integer of 15 to 2435, where both a and b | |
| | correspond to the positions of nucleotide residues shown in SEQ ID | |
| | NO:313, and where b is greater than or equal to a +14. | |
| 829136 | Preferably excluded from the present invention are one or more | N24451, N54675, AA135096, AA164383, AA180531, AA180520, |
| | polynucleotides comprising a nucleotide sequence described by the | AA179618, AA180509, C17250 |
| | general formula of a-b, where a is any integer between 1 to 2529 of | |
| | SEQ ID NO:314, b is an integer of 15 to 2543, where both a and b | |
| | correspond to the positions of nucleotide residues shown in SEQ ID | |
| | NO:314, and where b is greater than or equal to a +14. | |
| 829138 | Preferably excluded from the present invention are one or more | T57569, T86491, R00162, R00163, R91950, R92281, R93566, |
| | polynucleotides comprising a nucleotide sequence described by the | R93567, R98556, R98557, H82687, N23234, N23249, N27394, |
| | general formula of a-b, where a is any integer between 1 to 814 of | N40804, N52001, N54610, N62258, N69979, N79347, N98581, |
| | SEQ ID NO:315, b is an integer of 15 to 828, where both a and b | N98559, W24241, W30694, W39016, W49542, W49773, W93332, |
| | correspond to the positions of nucleotide residues shown in SEQ ID | W95036, N90230, AA015762, AA022871, AA022872, AA151308, |
| | NO:315, and where b is greater than or equal to a +14. | AA151309, AA203551, AA461104, AA424178, AA424202, |
| | | AA467853, AA467908, AA513455, AA564159, AA576516, |
| | | AA579461, AA740779, AA865373, AA938596, AA972781, |
| | | AA641536, AA092083 |
| 829142 | Preferably excluded from the present invention are one or more | |
| | polynucleotides comprising a nucleotide sequence described by the | |
| | general formula of a-b, where a is any integer between 1 to 1594 of | |
| | SEQ ID NO:316, b is an integer of 15 to 1608, where both a and b | |
| | correspond to the positions of nucleotide residues shown in SEQ ID | |
| | NO:316, and where b is greater than or equal to a +14. | |
| 829148 | Preferably excluded from the present invention are one or more | T70817, H97087, N28699, N59032, W31740, W63702 |
| | polynucleotides comprising a nucleotide sequence described by the | |
| | general formula of a-b, where a is any integer between 1 to 1043 of | |
| | SEQ ID NO:317, b is an integer of 15 to 1057, where both a and b | |
| | correspond to the positions of nucleotide residues shown in SEQ ID | |
| | NO:317, and where b is greater than or equal to a +14. | |
| 829149 | Preferably excluded from the present invention are one or more | T57875, AA062633, AA180493, AA255651, AA815168, |
| | polynucleotides comprising a nucleotide sequence described by the | AA827196, AA988896, AI032193 |
| | general formula of a-b, where a is any integer between 1 to 1322 of | |
| | SEQ ID NO:318, b is an integer of 15 to 1336, where both a and b | |
| | correspond to the positions of nucleotide residues shown in SEQ ID | |
| | NO:318, and where b is greater than or equal to a +14. | |
| 829156 | Preferably excluded from the present invention are one or more | |
| | polynucleotides comprising a nucleotide sequence described by the | |
| | general formula of a-b, where a is any integer between 1 to 482 of | |
| | SEQ ID NO:319, b is an integer of 15 to 496, where both a and b | |
| | correspond to the positions of nucleotide residues shown in SEQ ID | |
| | NO:319, and where b is greater than or equal to a +14. | |
| 829162 | Preferably excluded from the present invention are one or more | W28213, C20991 |
| | polynucleotides comprising a nucleotide sequence described by the | |
| | general formula of a-b, where a is any integer between 1 to 1742 of | |
| | SEQ ID NO:320, b is an integer of 15 to 1756, where both a and b | |
| | correspond to the positions of nucleotide residues shown in SEQ ID | |
| | NO:320, and where b is greater than or equal to a +14. | |
| 829170 | Preferably excluded from the present invention are one or more | T54688 |
| | polynucleotides comprising a nucleotide sequence described by the | |
| | general formula of a-b, where a is any integer between 1 to 574 of | |
| | SEQ ID NO:321, b is an integer of 15 to 588, where both a and b | |
| | correspond to the positions of nucleotide residues shown in SEQ ID | |
| | NO:321, and where b is greater than or equal to a +14. | |
| 829177 | Preferably excluded from the present invention are one or more | |
| | polynucleotides comprising a nucleotide sequence described by the | |
| | general formula of a-b, where a is any integer between 1 to 724 of | |
| | SEQ ID NO:322, b is an integer of 15 to 738, where both a and b | |
| | correspond to the positions of nucleotide residues shown in SEQ ID | |
| | NO:322, and where b is greater than or equal to a +14. | |
| 829179 | Preferably excluded from the present invention are one or more | |
| | polynucleotides comprising a nucleotide sequence described by the | |
| | general formula of a-b, where a is any integer between 1 to 862 of | |
| | SEQ ID NO:323, b is an integer of 15 to 876, where both a and b | |
| | correspond to the positions of nucleotide residues shown in SEQ ID | |
| | NO:323, and where b is greater than or equal to a +14. | |
| 829184 | Preferably excluded from the present invention are one or more | |
| | polynucleotides comprising a nucleotide sequence described by the | |
| | general formula of a-b, where a is any integer between 1 to 1308 of | |
| | SEQ ID NO:324, b is an integer of 15 to 1322, where both a and b | |
| | correspond to the positions of nucleotide residues shown in SEQ ID | |
| | NO:324, and where h is greater than or equal to a +14. | |
| 829185 | Preferably excluded from the present invention are one or more | |
| | polynucleotides comprising a nucleotide sequence described by the | |
| | general formula of a-b, where a is any integer between 1 to 328 of | |
| | SEQ ID NO:325, b is an integer of 15 to 342, where both a and b | |
| | correspond to the positions of nucleotide residues shown in SEQ ID | |
| | NO:325, and where h is greater than or equal to a +14. | |
| 829188 | Preferably excluded from the present invention are one or more | T58653, T58703, T75221, T77245, T77461, R09770, R10874, |
| | polynucleotides comprising a nucleotide sequence described by the | R10923, T78618, R05603, R12362, R13912, R23445, R26046, |
| | general formula of a-b, where a is any integer between 1 to 3676 of | R37744, R39442, R43682, R44004, R43682, R44004, H27016, |
| | SEQ ID NO:326, b is an integer of 15 to 3690, where both a and b | H50941, H51605, H52497, N23353, N28825, N35021, N45029, |
| | correspond to the positions of nucleotide residues shown in SEQ ID | N52865, N93751, N94155, W67224, W67334, W78117, W79824, |
| | NO:326, and where b is greater than or equal to a +14. | W94552, W92625, AA036842, AA040393, AA040497, |
| | | AA074284, AA075940, AA135258, AA157449, AA159938, |
| | | AA188822, AA188883, AA223533, AA280881, AA280961, |
| | | AA515694, AA573708, AA720966, AA730134, AA761564, |
| | | AA805432, AA826208, AA831736, AA833940, AA834312, |
| | | AA888244, AA911536, AA918643, AA922815, AA932119, |
| | | AA933022 |
| 829190 | Preferably excluded from the present invention are one or more | |
| | polynucleotides comprising a nucleotide sequence described by the | |
| | general formula of a-b, where a is any integer between 1 to 705 of | |
| | SEQ ID NO:327, b is an integer of 15 to 719, where both a and b | |
| | correspond to the positions of nucleotide residues shown in SEQ ID | |
| | NO:327, and where b is greater than or equal to a +14. | |
| 829193 | Preferably excluded from the present invention are one or more | AA043829 |
| | polynucleotides comprising a nucleotide sequence described by the | |
| | general formula of a-b, where a is any integer between 1 to 975 of | |
| | SEQ ID NO:328, b is an integer of 15 to 989, where both a and b | |
| | correspond to the positions of nucleotide residues shown in SEQ ID | |
| | NO:328, and where b is greater than or equal to a +14. | |
| 829196 | Preferably excluded from the present invention are one or more | AA156138 |
| | polynucleotides comprising a nucleotide sequence described by the | |
| | general formula of a-b, where a is any integer between 1 to 420 of | |
| | SEQ ID NO:329, b is an integer of 15 to 434, where both a and b | |
| | correspond to the positions of nucleotide residues shown in SEQ ID | |
| | NO:329, and where b is greater than or equal to a +14. | |
| 829197 | Preferably excluded from the present invention are one or more | R13055 |
| | polynucleotides comprising a nucleotide sequence described by the | |
| | general formula of a-b, where a is any integer between 1 to 682 of | |
| | SEQ ID NO:330, b is an integer of 15 to 696, where both a and b | |
| | correspond to the positions of nucleotide residues shown in SEQ ID | |
| | NO:330, and where b is greater than or equal to a +14. | |
| 829202 | Preferably excluded from the present invention are one or more | |
| | polynucleotides comprising a nucleotide sequence described by the | |
| | general formula of a-b, where a is any integer between 1 to 527 of | |
| | SEQ ID NO:331, b is an integer of 15 to 541, where both a and b | |
| | correspond to the positions of nucleotide residues shown in SEQ ID | |
| | NO:331, and where b is greater than or equal to a +14. | |
| 829203 | Preferably excluded from the present invention are one or more | |
| | polynucleotides comprising a nucleotide sequence described by the | |
| | general formula of a-b, where a is any integer between 1 to 291 of | |
| | SEQ ID NO:332, b is an integer of 15 to 305, where both a and b | |
| | correspond to the positions of nucleotide residues shown in SEQ ID | |
| | NO:332, and where b is greater than or equal to a +14. | |
| 829209 | Preferably excluded from the present invention are one or more | H96926 |
| | polynucleotides comprising a nucleotide sequence described by the | |
| | general formula of a-b, where a is any integer between 1 to 431 of | |
| | SEQ ID NO:333, b is an integer of 15 to 445, where both a and b | |
| | correspond to the positions of nucleotide residues shown in SEQ ID | |
| | NO:333, and where b is greater than or equal to a +14. | |
| 829210 | Preferably excluded from the present invention are one or more | |
| | polynucleotides comprising a nucleotide sequence described by the | |
| | general formula of a-b, where a is any integer between 1 to 303 of | |
| | SEQ ID NO:334, b is an integer of 15 to 317, where both a and b | |
| | correspond to the positions of nucleotide residues shown in SEQ ID | |
| | NO:334, and where b is greater than or equal to a +14. | |
| 829214 | Preferably excluded from the present invention are one or more | T65464, T65607, T65616, R68318, R81279, H19079, H21595, |
| | polynucleotides comprising a nucleotide sequence described by the | W38816, AA173621, AA195611, AA461025, AA429991, |
| | general formula of a-b, where a is any integer between 1 to 1510 of | AA281779, AA523034 |
| | SEQ ID NO;335, b is an integer of 15 to 1524, where both a and b | |
| | correspond to the positions of nucleotide residues shown in SEQ ID | |
| | NO:335, and where b is greater than or equal to a +14. | |
| 829215 | Preferably excluded from the present invention are one or more | |
| | polynucleotides comprising a nucleotide sequence described by the | |
| | general formula of a-b, where a is any integer between 1 to 292 of | |
| | SEQ ID NO:336, b is an integer of 15 to 306, where both a and b | |
| | correspond to the positions of nucleotide residues shown in SEQ ID | |
| | NO:336, and where b is greater than or equal to a +14. | |
| 829219 | Preferably excluded from the present invention are one or more | |
| | polynucleotides comprising a nucleotide sequence described by the | |
| | general formula of a-b, where a is any integer between 1 to 277 of | |
| | SEQ ID NO:337, his an integer of 15 to 291, where both a and b | |
| | correspond to the positions of nucleotide residues shown in SEQ ID | |
| | NO:337, and where b is greater than or equal to a +14. | |
| 829220 | Preferably excluded from the present invention are one or more | T91056, R08770, R10337, R185922, R08771, N30353, N33349, |
| | polynucleotides comprising a nucleotide sequence described by the | N34024, N36835, N43012, N46055, N46938, N47028, N48163, |
| | general formula of a-b, where a is any integer between 1 to 1250 of | N53309, N55453, N57768, N59733, N62846, N70614, N76825, |
| | SEQ ID NO:338, b is an integer of 15 to 1264, where both a and b | N77753, W04936, W46253, W57556, W80670, W88648, |
| | correspond to the positions of nucleotide residues shown in SEQ ID | AA081410, AA233146, AA251750, AA485043, AA554001, |
| | NO:338, and where b is greater than or equal to a +14. | AA628055, AA632073, AA632104, AA576915, AA814024, |
| | | AA829780, AA887202, AA902514, AA927412, AI056152, |
| | | AI085313, AI084094 |
| 829222 | Preferably excluded from the present invention are one or more | T53949, T55484, T55410, N57462, N93015, W21365, W88723, |
| | polynucleotides comprising a nucleotide sequence described by the | AA025365, AA081355, AA081356, AA418410, AA418507, |
| | general formula of a-b, where a is any integer between 1 to 745 of | AA422027, AA593855, AA593915, AA639807, AA814928, |
| | SEQ ID NO:339, b is an integer of 15 to 759, where both a and b | AA833745, AA872346, AA887280, AA904054, AA090282 |
| | correspond to the positions of nucleotide residues shown in SEQ ID | |
| | NO:339, and where b is greater than or equal to a +14. | |
| 829223 | Preferably excluded from the present invention are one or more | T39922, N73780, N74186, N99401, W49823, AA026960, |
| | polynucleotides comprising a nucleotide sequence described by the | AA028073, AA418303, AA418345, AA425606, AA425545, |
| | general formula of a-b, where a is any integer between 1 to 2625 of | AA426176, AA279347, AA492172, AA587366, AA621961, |
| | SEQ ID NO:340, b is an integer of 15 to 2639, where both a and b | AA621973, AA834751, AA641513 |
| | correspond to the positions of nucleotide residues shown in SEQ ID | |
| | NO:340, and where b is greater than or equal to a +14. | |
| 829225 | Preferably excluded from the present invention are one or more | T64318, R165668, AA016241, AA173963, AA618544 |
| | polynucleotides comprising a nucleotide sequence described by the | |
| | general formula of a-b, where a is any integer between 1 to 1810 of | |
| | SEQ ID NO:341, b is an integer of 15 to 1824, where both a and b | |
| | correspond to the positions of nucleotide residues shown in SEQ ID | |
| | N0:341, and where b is greater than or equal to a +14. | |
| 829226 | Preferably excluded from the present invention are one or more | R17300, R31023, R61393, R61438, R61703, R61704, R72584, |
| | polynucleotides comprising a nucleotide sequence described by the | R72589, R74189, R74276, R78679, H20944, H22649, H39794, |
| | general formula of a-b, where a is any integer between 1 to 4517 of | R84924, H79108, H79109, H81746, H81747, N32103, N38733, |
| | SEQ ID NO:342, b is an integer of 15 to 4531, where both a and b | N45414, N47287, N47868, N48370, N48604, N50820, N51222, |
| | correspond to the positions of nucleotide residues shown in SEQ ID | W19758, W38435, W44825, W74326, AA031730, AA045438, |
| | NO:342, and where b is greater than or equal to a +14. | AA046531, AA047110, AA047266, AA148821, AA150421, |
| | | AA169649, AA169829, AA169806, AA169813, AA171644, |
| | | AA171651, AA227734, AA228119, AA255720, AA258153, |
| | | AA424351, AA424866, AA426160, AA281120, AA281932, |
| | | AA594385, AA594783, AA627918, AA570350, AA744689, |
| | | AA748507, AA805709, AA806075, AA805170, AA865268, |
| | | AA872935, AA876562, AA911965, AA916659, AA917349, |
| | | AA918770, AA918850, AA946925, D81172, D81397, D78876, |
| | | C01437, N86700, N88264, C05670, C18759 |
| 829227 | Preferably excluded from the present invention are one or more | T47087, T47086, R44450, R44450, H13259, H95459, AA035630, |
| | polynucleotides comprising a nucleotide sequence described by the | AA179511, AA418751, AA527136, AA961714, AA992449 |
| | general formula of a-b, where a is any integer between 1 to 570 of | |
| | SEQ ID NO:343, b is an integer of 15 to 584, where both a and b | |
| | correspond to the positions of nucleotide residues shown in SEQ ID | |
| | NO:343, and where b is greater than or equal to a +14. | |
| 829231 | Preferably excluded from the present invention are one or more | |
| | polynucleotides comprising a nucleotide sequence described by the | |
| | general formula of a-b, where a is any integer between 1 to 764 of | |
| | SEQ ID NO:344, b is an integer of 15 to 778, where both a and b | |
| | correspond to the positions of nucleotide residues shown in SEQ ID | |
| | NO:344, and where b is greater than or equal to a +14. | |
| 829232 | Preferably excluded from the present invention are one or more | N26050, N40415, N41638, AA001329, AA001916, AA158802, |
| | polynucleotides comprising a nucleotide sequence described by the | AA158803, AA213393, AA213394, AA213538, AA424282, |
| | general formula of a-b, where a is any integer between 1 to 3726 of | AA459213, AA482209, AA482297, AA880754, AA729270, |
| | SEQ ID NO:345, b is an integer of 15 to 3740, where both a and b | AA737966, AA742269, AA804199, AA937087, N33467, N43860, |
| | correspond to the positions of nucleotide residues shown in SEQ ID | C02233 |
| | NO:345, and where b is greater than or equal to a +14. | |
| 829233 | Preferably excluded from the present invention are one or more | |
| | polynucleotides comprising a nucleotide sequence described by the | |
| | general formula of a-b, where a is any integer between 1 to 432 of | |
| | SEQ ID NO:346, b is an integer of 15 to 446, where both a and b | |
| | correspond to the positions of nucleotide residues shown in SEQ ID | |
| | NO:346, and where b is greater than or equal to a +14. | |
| 829239 | Preferably excluded from the present invention are one or more | |
| | polynucleotides comprising a nucleotide sequence described by the | |
| | general formula of a-b, where a is any integer between 1 to 768 of | |
| | SEQ ID NO:347, b is an integer of 15 to 782, where both a and b | |
| | correspond to the positions of nucleotide residues shown in SEQ ID | |
| | NO:347, and where b is greater than or equal to a +14. | |
| 829240 | Preferably excluded from the present invention are one or more | |
| | polynucleotides comprising a nucleotide sequence described by the | |
| | general formula of a-b, where a is any integer between 1 to 425 of | |
| | SEQ ID NO:348, b is an integer of 15 to 439, where both a and b | |
| | correspond to the positions of nucleotide residues shown in SEQ ID | |
| | NO:348, and where b is greater than or equal to a +14. | |
| 829242 | Preferably excluded from the present invention are one or more | T91514, T91542, T94168, T78752, R14281, R31952, R32000, |
| | polynucleotides comprising a nucleotide sequence described by the | R37970, R37971, R39326, R40572, R40572, R55803, R55886, |
| | general formula of a-b, where a is any integer between 1 to 2342 of | R66639, R81490, R81731, H53614, H53652, H87392, H97030, |
| | SEQ ID NO:349, b is an integer of 15 to 2356, where both a and b | N26679, N35814, N39832, N64783, N76195, N92867, N95188, |
| | correspond to the positions of nucleotide residues shown in SEQ ID | W21546, W25593, W61031, W78096, W79455, AA022610, |
| | NO:349, and where b is greater than or equal to a +14. | AA022611, AA034251, AA063637, AA102635, AA102677, |
| | | AA171440, AA190925, AA191317, AA223281, AA223381, |
| | | AA226876, AA227079, AA460842, AA461146, AA428884, |
| | | AA429051, AA429588, AA430105, AA526857, AA534144, |
| | | AA542854, AA542868, AA554978, AA582495, AA605088, |
| | | AA614111, AA614129, AA635924, AA580535, AA732502, |
| | | AA740954, AA812350, AA827279, AA857515, AA928973, |
| | | AA985646, AA995666, A1015556, U47719, N85053, C02475, |
| | | C14936, C20619 |
| 829246 | Preferably excluded from the present invention are one or more | |
| | polynucleotides comprising a nucleotide sequence described by the | |
| | general formula of a-b, where a is any integer between 1 to 1205 of | |
| | SEQ ID NO:350, b is an integer of 15 to 1219, where both a and b | |
| | correspond to the positions of nucleotide residues shown in SEQ ID | |
| | NO:350, and where b is greater than or equal to a +14. | |
| 829250 | Preferably excluded from the present invention are one or more | |
| | polynucleotides comprising a nucleotide sequence described by the | |
| | general formula of a-b, where a is any integer between 1 to 394 of | |
| | SEQ ID NO:351, b is an integer of 15 to 408, where both a and b | |
| | correspond to the positions of nucleotide residues shown in SEQ ID | |
| | NO:351, and where b is greater than or equal to a +14. | |
| 829253 | Preferably excluded from the present invention are one or more | |
| | polynucleotides comprising a nucleotide sequence described by the | |
| | general formula of a-b, where a is any integer between 1 to 1269 of | |
| | SEQ ID NO:352, b is an integer of 15 to 1283, where both a and b | |
| | correspond to the positions of nucleotide residues shown in SEQ ID | |
| | NO:352, and where b is greater than or equal to a +14. | |
| 829256 | Preferably excluded from the present invention are one or more | R17284, R17354, R17854, R24590, R33671, R33788, R35944, |
| | polynucleotides comprising a nucleotide sequence described by the | R36246, R36247, R36926, R43105, R44395, R49460, R49460, |
| | general formula of a-b, where a is any integer between ito 3215 of | R44395, R43105, H24440, H24469, H82721, H83591, N50755, |
| | SEQ ID NO:353, b is an integer of 15 to 3229, where both a and b | N55574, N64383, N92180, N90817, AA019697, AA026244, |
| | correspond to the positions of nucleotide residues shown in SEQ ID | AA026441, AA037458, AA037544, AA127492, AA127587, |
| | NO:353, and where b is greater than or equal to a +14. | AA190907, AA243225, AA243269, AA279209, AA503849, |
| | | AA507466, AA639522, AA731780, AA736864, AA766007, |
| | | AA090592 |
| 829263 | Preferably excluded from the present invention are one or more | N41747 |
| | polynucleotides comprising a nucleotide sequence described by the | |
| | general formula of a-b, where a is any integer between 1 to 492 of | |
| | SEQ ID NO:354, b is an integer of 15 to 506, where both a and b | |
| | correspond to the positions of nucleotide residues shown in SEQ ID | |
| | NO:354, and where b is greater than or equal to a +14. | |
| 829266 | Preferably excluded from the present invention are one or more | |
| | polynucleotides comprising a nucleotide sequence described by the | |
| | general formula of a-b, where a is any integer between 1 to 728 of | |
| | SEQ ID NO:355, b is an integer of 15 to 742, where both a and b | |
| | correspond to the positions of nucleotide residues shown in SEQ ID | |
| | NO:355, and where b is greater than or equal to a +14. | |
| 829271 | Preferably excluded from the present invention are one or more | T39261, T49204, T72303, T71643, R07380, T66682, T82066, |
| | polynucleotides comprising a nucleotide sequence described by the | T83481, R01790, R16223, R20708, R81714, H06087, H09039, |
| | general formula of a-b, where a is any integer between 1 to 1681 of | H46863, R96294, H50808, H84189, H84190, H84400, H91054, |
| | SEQ ID NO:356, b is an integer of 15 to 1695, where both a and b | H91348, H96283, N32070, N39797, N45073, N45382, W04773, |
| | correspond to the positions of nucleotide residues shown in SEQ ID | W21170, W52394, W51822, AA017710, AA017711, AA019476, |
| | NO:356, and where b is greater than or equal to a +14. | AA021323, AA021324, AA044865, AA045153, AA054523, |
| | | AA081533, AA083253, AA084388, AA083588, AA101641, |
| | | AA101642, AA101720, AA135652, AA136639, AA136846, |
| | | AA151892, AA179772, AA180489, AA187824, AA188556, |
| | | AA224078, AA232050, AA232154, AA425968, AA531528, |
| | | AA581305, AA742833, D83801, D83850, W22420 |
| 829273 | Preferably excluded from the present invention are one or more | |
| | polynucleotides comprising a nucleotide sequence described by the | |
| | general formula of a-b, where a is any integer between 1 to 914 of | |
| | SEQ ID NO:357, b is an integer of 15 to 928, where both a and b | |
| | correspond to the positions of nucleotide residues shown in SEQ ID | |
| | NO:357, and where b is greater than or equal to a +14. | |
| 829274 | Preferably excluded from the present invention are one or more | |
| | polynucleotides comprising a nucleotide sequence described by the | |
| | general formula of a-b, where a is any integer between 1 to 1360 of | |
| | SEQ ID NO:358, b is an integer of 15 to 1374, where both a and b | |
| | correspond to the positions of nucleotide residues shown in SEQ ID | |
| | NO:358, and where b is greater than or equal to a +14. | |
| 829276 | Preferably excluded from the present invention are one or more | |
| | polynucleotides comprising a nucleotide sequence described by the | |
| | general formula of a-b, where a is any integer between 1 to 4138 of | |
| | SEQ ID NO:359, b is an integer of 15 to 4152, where both a and b | |
| | correspond to the positions of nucleotide residues shown in SEQ ID | |
| | NO:359, and where b is greater than or equal to a +14. | |
| 829279 | Preferably excluded from the present invention are one or more | |
| | polynucleotides comprising a nucleotide sequence described by the | |
| | general formula of a-b, where a is any integer between 1 to 1142 of | |
| | SEQ ID NO:360, b is an integer of 15 to 1156, where both a and b | |
| | correspond to the positions of nucleotide residues shown in SEQ ID | |
| | NO:360, and where b is greater than or equal to a +14. | |
| 829280 | Preferably excluded from the present invention are one or more | |
| | polynucleotides comprising a nucleotide sequence described by the | |
| | general formula of a-b, where a is any integer between 1 to 362 of | |
| | SEQ ID NO:361, b is an integer of 15 to 376, where both a and b | |
| | correspond to the positions of nucleotide residues shown in SEQ ID | |
| | NO:361, and where b is greater than or equal to a +14. | |
| 829283 | Preferably excluded from the present invention are one or more | |
| | polynucleotides comprising a nucleotide sequence described by the | |
| | general formula of a-b, where a is any integer between 1 to 505 of | |
| | SEQ ID NO:362, b is an integer of 15 to 519, where both a and b | |
| | correspond to the positions of nucleotide residues shown in SEQ ID | |
| | NO:362, and where b is greater than or equal to a +14. | |
| 829284 | Preferably excluded from the present invention are one or more | R35022, N53092, W56437, AA425107, AA429328, AA639462 |
| | polynucleotides comprising a nucleotide sequence described by the | |
| | general formula of a-b, where a is any integer between 1 to 1371 of | |
| | SEQ ID NO:363, b is an integer of 15 to 1385, where both a and b | |
| | correspond to the positions of nucleotide residues shown in SEQ ID | |
| | NO:363, and where b is greater than or equal to a +14. | |
| 829285 | Preferably excluded from the present invention are one or more | T98355, N35799, N68373, AA233837, AA234338, AA541363, |
| | polynucleotides comprising a nucleotide sequence described by the | C05871, C06442 |
| | general formula of a-b, where a is any integer between 1 to 963 of | |
| | SEQ ID NO:364, b is an integer of 15 to 977, where both a and b | |
| | correspond to the positions of nucleotide residues shown in SEQ ID | |
| | NO:364, and where b is greater than or equal to a +14. | |
| 829287 | Preferably excluded from the present invention are one or more | T175573, T75574, T89291, 192020, T92115, R09394, R09395, |
| | polynucleotides comprising a nucleotide sequence described by the | T81925, T81926, T84370, H15008, H15009, H22443, H22477, |
| | general formula of a-b, where a is any integer between 1 to 950 of | H42624, H70914, H70998, H91740, H70914, N21387, N21568, |
| | SEQ ID NO:365, b is an integer of 15 to 964, where both a and b | N29475, N31342, N35714, N39243, N46687, N58940, N62219, |
| | correspond to the positions of nucleotide residues shown in SEQ ID | N62544, N71355, N73001, N79212, N79311, N80035, N92595, |
| | NO:365, and where b is greater than or equal to a +14. | N95523, N99823, W02965, W06998, W17066, W17239, W37312, |
| | | W37553, W38873, W38985, W42735, W42825, W44743, |
| | | W45210, W60642, W60643, W61216, W72457, W73365, |
| | | W73442, W73919, W74445, W78073, W94432, W92526, |
| | | W95225, N89652, N89752, AA034453, AA046851, AA046813, |
| | | AA053964, AA055047, AA055127, AA074513, AA081359, |
| | | AA084042, AA098833, AA112180, AA136464, AA165072, |
| | | AA164675, AA190836, AA255622, AA256734, AA428625, |
| | | AA484049, AA513283, AA535853, F16222, AA587936, |
| | | AA614830, AA767121, AA814435, AA832516, AA829611, |
| | | AA829918, AA872922, AA910970, AA987945, AA988657, |
| | | AA948052, A1094757, D79222, D79845, W79251, C00060 |
| 829295 | Preferably excluded from the present invention are one or more | N79069, N94383, AA046494, AA046766, AA101963, AA099652, |
| | polynucleotides comprising a nucleotide sequence described by the | AA135109, AA135264, AA148582, AA148581, AA150460, |
| | general formula of a-b, where a is any integer between 1 to 1283 of | AA156662, AA534768, AA557811, AA687147, AA730106, |
| | SEQ ID NO:366, b is an integer of 15 to 1297, where both a and b | AA810732, AA911850 |
| | correspond to the positions of nucleotide residues shown in SEQ ID | |
| | NO:366, and where b is greater than or equal to a +14. | |
| 829296 | Preferably excluded from the present invention are one or more | |
| | polynucleotides comprising a nucleotide sequence described by the | |
| | general formula of a-b, where a is any integer between 1 to 771 of | |
| | SEQ ID NO:367, b is an integer of 15 to 785, where both a and b | |
| | correspond to the positions of nucleotide residues shown in SEQ ID | |
| | NO:367, and where b is greater than or equal to a +14. | |
| 829297 | Preferably excluded from the present invention are one or more | H63163, H69239, AA291944, AA827871, AA995955 |
| | polynucleotides comprising a nucleotide sequence described by the | |
| | general formula of a-b, where a is any integer between 1 to 906 of | |
| | SEQ ID NO:368, b is an integer of 15 to 920, where both a and b | |
| | correspond to the positions of nucleotide residues shown in SEQ ID | |
| | NO:368, and where b is greater than or equal to a +14. | |
| 829298 | Preferably excluded from the present invention are one or more | T85571, T85572, T98605, R06410, R06411, R72558, W25247, |
| | polynucleotides comprising a nucleotide sequence described by the | W58681, AA126722, AA137218, AA136191, AA531469, |
| | general formula of a-b, where a is any integer between 1 to 820 of | AA565025, AA948354, AA978354, AA988766, AI057145, |
| | SEQ ID NO:369, b is an integer of 15 to 834, where both a and b | N95214 |
| | correspond to the positions of nucleotide residues shown in SEQ ID | |
| | NO:369, and where b is greater than or equal to a +14. | |
| 829302 | Preferably excluded from the present invention are one or more | R165369, R16190, R51781, H70499, AA203397 |
| | polynucleotides comprising a nucleotide sequence described by the | |
| | general formula of a-b, where a is any integer between 1 to 933 of | |
| | SEQ ID NO:370, b is an integer of 15 to 947, where both a and b | |
| | correspond to the positions of nucleotide residues shown in SEQ ID | |
| | NO:370, and where b is greater than or equal to a +14. | |
| 829304 | Preferably excluded from the present invention are one or more | |
| | polynucleotides comprising a nucleotide sequence described by the | |
| | general formula of a-b, where a is any integer between 1 to 2326 of | |
| | SEQ ID NO:371, b is an integer of 15 to 2340, where both a and b | |
| | correspond to the positions of nucleotide residues shown in SEQ ID | |
| | NO:371, and where b is greater than or equal to a +14. | |
| 829320 | Preferably excluded from the present invention are one or more | T83172, T83188, T98062, H14392, AA196911, AA514594 |
| | polynucleotides comprising a nucleotide sequence described by the | |
| | general formula of a-b, where a is any integer between 1 to 1561 of | |
| | SEQ ID NO:372, b is an integer of 15 to 1575, where both a and b | |
| | correspond to the positions of nucleotide residues shown in SEQ ID | |
| | NO:372, and where b is greater than or equal to a +14. | |
| 829322 | Preferably excluded from the present invention are one or more | |
| | polynucleotides comprising a nucleotide sequence described by the | |
| | general formula of a-b, where a is any integer between 1 to 1864 of | |
| | SEQ ID NO:373, b is an integer of 15 to 1878, where both a and b | |
| | correspond to the positions of nucleotide residues shown in SEQ ID | |
| | NO:373, and where b is greater than or equal to a +14. | |
| 829355 | Preferably excluded from the present invention are one or more | |
| | polynucleotides comprising a nucleotide sequence described by the | |
| | general formula of a-b, where a is any integer between 1 to 832 of | |
| | SEQ ID NO:374, b is an integer of 15 to 846, where both a and b | |
| | correspond to the positions of nucleotide residues shown in SEQ ID | |
| | NO:374, and where b is greater than or equal to a +14. | |
| 829364 | Preferably excluded from the present invention are one or more | R10800, H79360, AA130522 |
| | polynucleotides comprising a nucleotide sequence described by the | |
| | general formula of a-b, where a is any integer between 1 to 643 of | |
| | SEQ ID NO:375, b is an integer of 15 to 657, where both a and b | |
| | correspond to the positions of nucleotide residues shown in SEQ ID | |
| | NO:375, and where b is greater than or equal to a +14. | |
| 829919 | Preferably excluded from the present invention are one or more | |
| | polynucleotides comprising a nucleotide sequence described by the | |
| | general formula of a-b, where a is any integer between 1 to 681 of | |
| | SEQ ID NO:376, b is an integer of 15 to 695, where both a and b | |
| | correspond to the positions of nucleotide residues shown in SEQ ID | |
| | NO:376, and where b is greater than or equal to a +14. | |
| 829941 | Preferably excluded from the present invention are one or more | |
| | polynucleotides comprising a nucleotide sequence described by the | |
| | general formula of a-b, where a is any integer between 1 to 3596 of | |
| | SEQ ID NO:377, b is an integer of 15 to 3610, where both a and b | |
| | correspond to the positions of nucleotide residues shown in SEQ ID | |
| | NO:377, and where b is greater than or equal to a +14. | |
| 829945 | Preferably excluded from the present invention are one or more | |
| | polynucleotides comprising a nucleotide sequence described by the | |
| | general formula of a-b, where a is any integer between 1 to 209 of | |
| | SEQ ID NO:378, b is an integer of 15 to 223, where both a and b | |
| | correspond to the positions of nucleotide residues shown in SEQ ID | |
| | NO:378, and where b is greater than or equal to a +14. | |
| 829946 | Preferably excluded from the present invention are one or more- | AA288019, AA502347, AA904261 |
| | polynucleotides comprising a nucleotide sequence described by the | |
| | general formula of a-b, where a is any integer between 1 to 795 of | |
| | SEQ ID NO:379, b is an integer of 15 to 809, where both a and b | |
| | correspond to the positions of nucleotide residues shown in SEQ ID | |
| | NO:379, and where b is greater than or equal to a +14. | |
| 829947 | Preferably excluded from the present invention are one or more | T66737, T66738, T74003, T77189, T80326, R13808, R14624, |
| | polynucleotides comprising a nucleotide sequence described by the | R15371, R16290, R19838, R21469, R24972, R37667, R38092, |
| | general formula of a-b, where a is any integer between 1 to 2536 of | R39443, R39761, R40215, R40379, R42113, R45233, R42113, |
| | SEQ ID NO:380, b is an integer of 15 to 2550, where both a and b | R42856, R40215, R40379, R45233, R45937, R56287, R59950, |
| | correspond to the positions of nucleotide residues shown in SEQ ID | R59951, R60203, R60436, H09760, H09845, H10702, |
| | NO:380, and where b is greater than or equal to a +14. | H19185, H29333, H29426, N94574, W30864, W45066, W45179, |
| | | W47249, W47622, W47621, W73903, W74765, W95498, |
| | | W95585, AA039360, AA039359, AA043667, AA057482, |
| | | AA083653, AA088919, AA131592, AA135473, AA135544, |
| | | AA147364, AA147416, AA161437, AA164913, AA165378, |
| | | AA164333, AA181099, AA430483, AA281878, AA291947, |
| | | AA493956, AA582300, AA740445, AA743497, AA875945, |
| | | AA878761, AA923149, AA931525, AA931950, AA935699, |
| | | AA947521, AA962775, AA977566, AA984017, AA988746, |
| | | A1095060, D82399, W25818, W51914, C15840 |
| 829952 | Preferably excluded from the present invention are one or more | R17678, R26888, R27120, R35870, R35871, R51276, R66882, |
| | polynucleotides comprising a nucleotide sequence described by the | R67967, H27381, H28345, H38579, R93605, R97908, R97907, |
| | general formula of a-b, where a is any integer between 1 to 1254 of | H53653, H61431, H61432, H62657, H63776, H63826, H65287, |
| | SEQ ID NO:381, b is an integer of 15 to 1268, where both a and b | H65810, H89508, H89654, N74909, W23437, AA026270, |
| | correspond to the positions of nucleotide residues shown in SEQ ID | AA026558, AA177150, AA515407, AA527495, AA535324, |
| | NO:381, and where b is greater than or equal to a +14. | AA594129, AA568558, AA864390, AA999878, AI014459, |
| | | AI017407, AI017824 |
| 829954 | Preferably excluded from the present invention are one or more | |
| | polynucleotides comprising a nucleotide sequence described by the | |
| | general formula of a-b, where a is any integer between 1 to 840 of | |
| | SEQ ID NO:382, b is an integer of 15 to 854, where both a and b | |
| | correspond to the positions of nucleotide residues shown in SEQ ID | |
| | NO:382, and where b is greater than or equal to a +14. | |
| 829955 | Preferably excluded from the present invention are one or more | T47229, T47230, R02311, R43154, R51528, R43154, H42209, |
| | polynucleotides comprising a nucleotide sequence described by the | R88215, N49583, N93033, W21271, W31966, AA029149, |
| | general formula of a-b, where a is any integer between 1 to 1077 of | AA513795, AA548358, AA612791, AA633375, AA830042, |
| | SEQ ID NO:383, b is an integer of 15 to 1091, where both a and b | AA917951, N83314, N86243, C02678 |
| | correspond to the positions of nucleotide residues shown in SEQ ID | |
| | NO:383, and where b is greater than or equal to a +14. | |
| 829957 | Preferably excluded from the present invention are one or more | T39589, T40683, H47643, R92700, R99102, R99644, H53816, |
| | polynucleotides comprising a nucleotide sequence described by the | H58333, H58722, H61989, H61990, H63765, H63809, H73313, |
| | general formula of a-b, where a is any integer between 1 to 1015 of | H73501, N38910, N46484, N66604, N69475, N75847, W01771, |
| | SEQ ID NO:384, b is an integer of 15 to 1029, where both a and b | W07430, W74706, W74743, W87451, W87550, N90967, |
| | correspond to the positions of nucleotide residues shown in SEQ ID | AA010671, AA011259, AA026367, AA026459, AA063538, |
| | NO:384, and where b is greater than or equal to a +14. | AA133609, AA157688, AA157767, AA252640, AA262927, |
| | | AA417991, AA418050, AA425054, AA429232, AA505081, |
| | | AA602637, AA569939, AA688193, AA714567, AA715109, |
| | | AA721733, AA761769, AA824602, AA829416, AA910995, |
| | | AA932302, AA934664, AA960927, AA973923, AI002231, |
| | | AI094664 |
| 829958 | Preferably excluded from the present invention are one or more | W31195, W38586, N90200, AA045674, AA045675, AA064826, |
| | polynucleotides comprising a nucleotide sequence described by the | AA064769, AA082177, AA129757, AA133252, AA187005, |
| | general formula of a-b, where a is any integer between 1 to 569 of | AA188378, AA226394, AA491262, AA523135, AA527421, |
| | SEQ ID NO:385, b is an integer of 15 to 583, where both a and b | AA527902, AA533279, AA554691, AA632078, AA721457, |
| | correspond to the positions of nucleotide residues shown in SEQ ID | AA743821, AA760765, AA766192, AA769476, AA805805, |
| | NO:385, and where b is greater than or equal to a +14. | AA815094, AA826696, AA873340, AA876652, AA902562, |
| | | AA935370, AA091473 |
| 829960 | Preferably excluded from the present invention are one or more | T87492, T89410, T89773, T80188, T83347, T83577, T85604, |
| | polynucleotides comprising a nucleotide sequence described by the | T86095, H44324, R86738, R86745, R87175, R87176, R93579, |
| | general formula of a-b, where a is any integer between 1 to 2396 of | R97628, H59234, H67776, H69384, H89665, H90369, H91278, |
| | SEQ ID NO:386, b is an integer of 15 to 2410, where both a and b | H93827, N59685, N73235, N77230, N99493, W01816, W07398, |
| | correspond to the positions of nucleotide residues shown in SEQ ID | W07499, AA011532, AA127663, AA127842, AA127871, |
| | NO:386, and where b is greater than or equal to a +14. | AA131770, AA131783, AA203697, AA223149, AA657524, |
| | | AA770678, AA828971, AA937743 |
| 829966 | Preferably excluded from the present invention are one or more | T94747, T91932, R10556, T95267, T95268, H90557, N59601, |
| | polynucleotides comprising a nucleotide sequence described by the | W02671, W03166, AA523419 |
| | general formula of a-b, where a is any integer between 1 to 675 of | |
| | SEQ ID NO:387, b is an integer of 15 to 689, where both a and b | |
| | correspond to the positions of nucleotide residues shown in SEQ ID | |
| | NO:387, and where b is greater than or equal to a +14. | |
| 829967 | Preferably excluded from the present invention are one or more | T66815, T66816, T90190, R07384, T81628, T81788, T82103, |
| | polynucleotides comprising a nucleotide sequence described by the | T83000, R23462, R25324, R26060, R31477, R31478, R66771, |
| | general formula of a-b, where a is any integer between 1 to 784 of | T80777, R80976, H13673, H13721, R98517, H92094, H94096, |
| | SEQ ID NO:388, b is an integer of 15 to 798, where both a and b | H94097, N30791, N31967, N32621, N41566, N47840, N57286, |
| | correspond to the positions of nucleotide residues shown in SEQ ID | N75841, W07482, W16880, W46399, W46507, W72152, W77912, |
| | NO:388, and where b is greater than or equal to a +14. | AA040326, AA040305, AA147001, AA147002, AA176399, |
| | | AA178863, AA188782, AA188633, AA502400, AA503270, |
| | | AA508898, AA515395, AA557399, AA610193, AA714481, |
| | | AA740261, AA748847, AA760659, AA766512, AA824416, |
| | | AA877577, AA910372, AA938717, AI018625, AI056489, |
| | | N92492, A1084101, AA642564 |
| 829970 | Preferably excluded from the present invention are one or more | W57592, AA253247 |
| | polynucleotides comprising a nucleotide sequence described by the | |
| | general formula of a-b, where a is any integer between 1 to 1677 of | |
| | SEQ ID NO:389, b is an integer of 15 to 1691, where both a and b | |
| | correspond to the positions of nucleotide residues shown in SEQ ID | |
| | NO:389, and where b is greater than or equal to a +14. | |
| 829981 | Preferably excluded from the present invention are one or more | N44941 |
| | polynucleotides comprising a nucleotide sequence described by the | |
| | general formula of a-b, where a is any integer between 1 to 440 of | |
| | SEQ ID NO:390, b is an integer of 15 to 454, where both a and b | |
| | correspond to the positions of nucleotide residues shown in SEQ ID | |
| | NO:390, and where b is greater than or equal to a +14. | |
| 829985 | Preferably excluded from the present invention are one or more | T58690, H10115, AA101544, AA171779, AA173847 |
| | polynucleotides comprising a nucleotide sequence described by the | |
| | general formula of a-b, where a is any integer between 1 to 793 of | |
| | SEQ ID NO:391, b is an integer of 15 to 807, where both a and b | |
| | correspond to the positions of nucleotide residues shown in SEQ ID | |
| | NO:391, and where b is greater than or equal to a +14. | |
| 829986 | Preferably excluded from the present invention are one or more | R72689, H39575, AA516440, AA662417 |
| | polynucleotides comprising a nucleotide sequence described by the | |
| | general formula of a-b, where a is any integer between 1 to 913 of | |
| | SEQ ID NO:392, b is an integer of 15 to 927, where both a and b | |
| | correspond to the positions of nucleotide residues shown in SEQ ID | |
| | NO:392, and where b is greater than or equal to a +14. | |
| 829988 | Preferably excluded from the present invention are one or more | |
| | polynucleotides comprising a nucleotide sequence described by the | |
| | general formula of a-b, where a is any integer between 1 to 1009 of | |
| | SEQ ID NO:393, b is an integer of 15 to 1023, where both a and b | |
| | correspond to the positions of nucleotide residues shown in SEQ ID | |
| | NO:393, and where b is greater than or equal to a +14. | |
| 829990 | Preferably excluded from the present invention are one or more | |
| | polynucleotides comprising a nucleotide sequence described by the | |
| | general formula of a-b, where a is any integer between 1 to 808 of | |
| | SEQ ID NO:394, b is an integer of 15 to 822, where both a and b | |
| | correspond to the positions of nucleotide residues shown in SEQ ID | |
| | NO:394, and where b is greater than or equal to a +14. | |
| 829991 | Preferably excluded from the present invention are one or more | N22386, AA461107, AA493109, AA932044, AA976154, |
| | polynucleotides comprising a nucleotide sequence described by the | AA995814 |
| | general formula of a-b, where a is any integer between 1 to 1688 of | |
| | SEQ ID NO:395, b is an integer of 15 to 1702, where both a and b | |
| | correspond to the positions of nucleotide residues shown in SEQ ID | |
| | NO:395, and where b is greater than or equal to a +14. | |
| 829992 | Preferably excluded from the present invention are one or more | W44338, W44452, AA600841, AA577032, AA936480, AA973451 |
| | polynucleotides comprising a nucleotide sequence described by the | |
| | general formula of a-b, where a is any integer between 1 to 844 of | |
| | SEQ ID NO:396, b is an integer of 15 to 858, where both a and b | |
| | correspond to the positions of nucleotide residues shown in SEQ ID | |
| | NO:396, and where b is greater than or equal to a +14. | |
| 829993 | Preferably excluded from the present invention are one or more | |
| | polynucleotides comprising a nucleotide sequence described by the | |
| | general formula of a-b, where a is any integer between 1 to 1096 of | |
| | SEQ ID NO:397, b is an integer of 15 to 1110, where both a and b | |
| | correspond to the positions of nucleotide residues shown in SEQ ID | |
| | NO:397, and where b is greater than or equal to a +14. | |
| 829998 | Preferably excluded from the present invention are one or more | R12950, R56786, H09888, H91803 |
| | polynucleotides comprising a nucleotide sequence described by the | |
| | general formula of a-b, where a is any integer between 1 to 850 of | |
| | SEQ ID NO:398, b is an integer of 15 to 864, where both a and b | |
| | correspond to the positions of nucleotide residues shown in SEQ ID | |
| | NO;398, and where b is greater than or equal to a +14. | |
| 829999 | Preferably excluded from the present invention are one or more | |
| | polynucleotides comprising a nucleotide sequence described by the | |
| | general formula of a-b, where a is any integer between 1 to 257 of | |
| | SEQ ID NO:399, b is an integer of 15 to 271, where both a and b | |
| | correspond to the positions of nucleotide residues shown in SEQ ID | |
| | NO:399, and where b is greater than or equal to a +14. | |
| 830000 | Preferably excluded from the present invention are one or more | |
| | polynucleotides comprising a nucleotide sequence described by the | |
| | general formula of a-b, where a is any integer between 1 to 911 of | |
| | SEQ ID NO:400, b is an integer of 15 to 925, where both a and b | |
| | correspond to the positions of nucleotide residues shown in SEQ ID | |
| | NO:400, and where b is greater than or equal to a +14. | |
| 830001 | Preferably excluded from the present invention are one or more | |
| | polynucleotides comprising a nucleotide sequence described by the | |
| | general formula of a-b, where a is any integer between 1 to 1071 of | |
| | SEQ ID NO:401, b is an integer of 15 to 1085, where both a and b | |
| | correspond to the positions of nucleotide residues shown in SEQ ID | |
| | NO:401, and where b is greater than or equal to a +14. | |
| 830005 | Preferably excluded from the present invention are one or more | |
| | polynucleotides comprising a nucleotide sequence described by the | |
| | general formula of a-b, where a is any integer between 1 to 334 of | |
| | SEQ ID NO:402, b is an integer of 15 to 348, where both a and b | |
| | correspond to the positions of nucleotide residues shown in SEQ ID | |
| | NO:402, and where b is greater than or equal to a +14. | |
| 830009 | Preferably excluded from the present invention are one or more | |
| | polynucleotides comprising a nucleotide sequence described by the | |
| | general formula of a-b, where a is any integer between 1 to 1456 of | |
| | SEQ ID NO:403, b is an integer of 15 to 1470, where both a and b | |
| | correspond to the positions of nucleotide residues shown in SEQ ID | |
| | NO:403, and where b is greater than or equal to a +14. | |
| 830010 | Preferably excluded from the present invention are one or more | |
| | polynucleotides comprising a nucleotide sequence described by the | |
| | general formula of a-b, where a is any integer between 1 to 2473 of | |
| | SEQ ID NO:404, b is an integer of 15 to 2487, where both a and b | |
| | correspond to the positions of nucleotide residues shown in SEQ ID | |
| | NO:404, and where b is greater than or equal to a +14. | |
| 830127 | Preferably excluded from the present invention are one or more | T80487, R61657 |
| | polynucleotides comprising a nucleotide sequence described by the | |
| | general formula of a-b, where a is any integer between 1 to 1242 of | |
| | SEQ ID NO:405, b is an integer of 15 to 1256, where both a and b | |
| | correspond to the positions of nucleotide residues shown in SEQ ID | |
| | NO:405, and where b is greater than or equal to a +14. | |
| 830128 | Preferably excluded from the present invention are one or more | |
| | polynucleotides comprising a nucleotide sequence described by the | |
| | general formula of a-b, where a is any integer between 1 to 757 of | |
| | SEQ ID NO:406, b is an integer of 15 to 771, where both a and b | |
| | correspond to the positions of nucleotide residues shown in SEQ ID | |
| | NO:406, and where b is greater than or equal to a +14. | |
| 830129 | Preferably excluded from the present invention are one or more | T53792, T53907, T53943, T62085, T62142, R20454, R78770, |
| | polynucleotides comprising a nucleotide sequence described by the | R78927, R79027, R79077, H98608, N48338, N49063, W01400, |
| | general formula of a-b, where a is any integer between ito 2629 of | W52282, W57571, AA035258, AA035470, AA101541, |
| | SEQ ID NO:407, b is an integer of 15 to 2643, where both a and b | AA114162, AA121802, AA129334, AA129628, AA130575, |
| | correspond to the positions of nucleotide residues shown in SEQ ID | AA130988, AA131026, AA156750, AA156922, AA157263, |
| | NO:407, and where b is greater than or equal to a +14. | AA157360, AA223729, AA223816, AA4891148, AA490861, |
| | | AA516421, AA526784, AA533164, AA535426, AA552972, |
| | | AA583471, AA605156, AA575994, AA747160, AA804291, |
| | | AA887994, AA937881, AA948245, AA974518, AA974784, |
| | | AI002302, AI081153, N84559, N86782, AA642578, AA093419 |
| 830137 | Preferably excluded from the present invention are one or more | |
| | polynucleotides comprising a nucleotide sequence described by the | |
| | general formula of a-b, where a is any integer between 1 to 1632 of | |
| | SEQ ID NO:408, b is an integer of 15 to 1646, where both a and b | |
| | correspond to the positions of nucleotide residues shown in SEQ ID | |
| | NO:408, and where b is greater than or equal to a +14. | |
| 830140 | Preferably excluded from the present invention are one or more | |
| | polynucleotides comprising a nucleotide sequence described by the | |
| | general formula of a-b, where a is any integer between 1 to 862 of | |
| | SEQ ID NO:409, b is an integer of 15 to 876, where both a and b | |
| | correspond to the positions of nucleotide residues shown in SEQ ID | |
| | NO:409, and where b is greater than or equal to a +14. | |
| 830157 | Preferably excluded from the present invention are one or more | |
| | polynucleotides comprising a nucleotide sequence described by the | |
| | general formula of a-b, where a is any integer between 1 to 1836 of | |
| | SEQ ID NO:410, b is an integer of 15 to 1850, where both a and b | |
| | correspond to the positions of nucleotide residues shown in SEQ ID | |
| | NO:410, and where b is greater than or equal to a +14. | |
| 830195 | Preferably excluded from the present invention are one or more | |
| | polynucleotides comprising a nucleotide sequence described by the | |
| | general formula of a-b, where a is any integer between 1 to 647 of | |
| | SEQ ID NO:411, b is an integer of 15 to 661, where both a and b | |
| | correspond to the positions of nucleotide residues shown in SEQ ID | |
| | NO:411, and where b is greater than or equal to a +14. | |
| 830196 | Preferably excluded from the present invention are one or more | T47007, T47008, T59996, 163678, T72979, 173043, R20327, |
| | polynucleotides comprising a nucleotide sequence described by the | R34736, H18043, H69946, H98876, W79567, AA069850, |
| | general formula of a-b, where a is any integer between 1 to 1249 of | AA070319, AA074422, AA076309, AA081601, AA101958, |
| | SEQ ID NO:412, b is an integer of 15 to 1263, where both a and b | AA113902, AA126400, AA134002, AA134658, AA134640, |
| | correspond to the positions of nucleotide residues shown in SEQ ID | AA135254, AA146731, AA155584, AA157966, AA159110, |
| | NO:412, and where b is greater than or equal to a +14. | AA159386, AA159466, AA160637, AA179462, AA1829 17, |
| | | AA182648, AA190534, AA220918, AA223557, AA227300, |
| | | AA232517, AA233585, AA932527, N83710, N85080, W28216, |
| | | W28475, W28650, AA090479 |
| 830409 | Preferably excluded from the present invention are one or more | |
| | polynucleotides comprising a nucleotide sequence described by the | |
| | general formula of a-b, where a is any integer between 1 to 1323 of | |
| | SEQ ID NO:413, b is an integer of 15 to 1337, where both a and b | |
| | correspond to the positions of nucleotide residues shown in SEQ ID | |
| | NO:413, and where b is greater than or equal to a +14. | |
| 830417 | Preferably excluded from the present invention are one or more | T70867, R12290, T78032, T80453, T80532, R12432, R12507, |
| | polynucleotides comprising a nucleotide sequence described by the | R18857, R23505, R51536, R52975, R53640, H12996, H22829, |
| | general formula of a-b, where a is any integer between 1 to 778 of | H63914, H64034, H71775, H85810, H97709, N42249, W39175, |
| | SEQ ID NO:414, b is an integer of 15 to 792, where both a and b | AA018531, AA018491, AA018481, AA052919, AA079678, |
| | correspond to the positions of nucleotide residues shown in SEQ ID | AA083267, AA102444, AA127022, AA147778, AA226551, |
| | NO:414, and where b is greater than or equal to a +14. | AA994837, N84172, W95500, C02827, C04397, AA090040 |
| 830531 | Preferably excluded from the present invention are one or more | |
| | polynucleotides comprising a nucleotide sequence described by the | |
| | general formula of a-b, where a is any integer between 1 to 1328 of | |
| | SEQ ID NO:415, b is an integer of 15 to 1342, where both a and b | |
| | correspond to the positions of nucleotide residues shown in SEQ ID | |
| | NO:415, and where b is greater than or equal to a +14. | |
| 830677 | Preferably excluded from the present invention are one or more | |
| | polynucleotides comprising a nucleotide sequence described by the | |
| | general formula of a-b, where a is any integer between 1 to 1099 of | |
| | SEQ ID NO:416, b is an integer of 15 to 1113, where both a and b | |
| | correspond to the positions of nucleotide residues shown in SEQ ID | |
| | NO:416, and where b is greater than or equal to a +14. | |
| 831355 | Preferably excluded from the present invention are one or more | |
| | polynucleotides comprising a nucleotide sequence described by the | |
| | general formula of a-b, where a is any integer between 1 to 1160 of | |
| | SEQ ID NO:417, b is an integer of 15 to 1174, where both a and b | |
| | correspond to the positions of nucleotide residues shown in SEQ ID | |
| | NO:417, and where b is greater than or equal to a +14. | |
| 831420 | Preferably excluded from the present invention are one or more | |
| | polynucleotides comprising a nucleotide sequence described by the | |
| | general formula of a-b, where a is any integer between 1 to 659 of | |
| | SEQ ID NO:418, b is an integer of 15 to 673, where both a and b | |
| | correspond to the positions of nucleotide residues shown in SEQ ID | |
| | NO:418, and where b is greater than or equal to a +14. | |
| 831702 | Preferably excluded from the present invention are one or more | |
| | polynucleotides comprising a nucleotide sequence described by the | |
| | general formula of a-b, where a is any integer between 1 to 2164 of | |
| | SEQ ID NO:419, b is an integer of 15 to 2178, where both a and b | |
| | correspond to the positions of nucleotide residues shown in SEQ ID | |
| | NO:419, and where b is greater than or equal to a +14. | |
| 831717 | Preferably excluded from the present invention are one or more | |
| | polynucleotides comprising a nucleotide sequence described by the | |
| | general formula of a-b, where a is any integer between 1 to 1870 of | |
| | SEQ ID NO:420, b is an integer of 15 to 1884, where both a and b | |
| | correspond to the positions of nucleotide residues shown in SEQ ID | |
| | NO:420, and where b is greater than or equal to a +14. | |
| 832488 | Preferably excluded from the present invention are one or more | |
| | polynucleotides comprising a nucleotide sequence described by the | |
| | general formula of a-b, where a is any integer between 1 to 608 of | |
| | SEQ ID NO:421, b is an integer of 15 to 622, where both a and b | |
| | correspond to the positions of nucleotide residues shown in SEQ ID | |
| | N0:421, and where b is greater than or equal to a +14. | |
| 833207 | Preferably excluded from the present invention are one or more | |
| | polynucleotides comprising a nucleotide sequence described by the | |
| | general formula of a-b, where a is any integer between 1 to 1271 of | |
| | SEQ ID NO:422, b is an integer of 15 to 1285, where both a and b | |
| | correspond to the positions of nucleotide residues shown in SEQ ID | |
| | NO:422, and where b is greater than or equal to a +14. | |
| 835940 | Preferably excluded from the present invention are one or more | |
| | polynucleotides comprising a nucleotide sequence described by the | |
| | general formula of a-b, where a is any integer between 1 to 514 of | |
| | SEQ ID NO:423, b is an integer of 15 to 528, where both a and b | |
| | correspond to the positions of nucleotide residues shown in SEQ ID | |
| | NO:423, and where b is greater than or equal to a +14. | |
| 836953 | Preferably excluded from the present invention are one or more | |
| | polynucleotides comprising a nucleotide sequence described by the | |
| | general formula of a-b, where a is any integer between 1 to 3104 of | |
| | SEQ ID NO:424, his an integer of 15 to 3118, where both a and b | |
| | correspond to the positions of nucleotide residues shown in SEQ ID | |
| | NO:424, and where b is greater than or equal to a +14. | |
| 837105 | Preferably excluded from the present invention are one or more | |
| | polynucleotides comprising a nucleotide sequence described by the | |
| | general formula of a-b, where a is any integer between 1 to 1396 of | |
| | SEQ ID NO:425, b is an integer of 15 to 1410, where both a and b | |
| | correspond to the positions of nucleotide residues shown in SEQ ID | |
| | NO:425, and where b is greater than or equal to a +14. | |
| 837300 | Preferably excluded from the present invention are one or more | R22778, H06717, H18453, H26987, H26988, N33207, N44745, |
| | polynucleotides comprising a nucleotide sequence described by the | W57874, W58145, AA040435, AA278615, AA507344, |
| | general formula of a-b, where a is any integer between 1 to 1408 of | AA558666, AA578863, AA872443, AA877052, AA877120, |
| | SEQ ID NO:426, b is an integer of 15 to 1422, where both a and b | AA879047, AA887537, AA910397, AA931214, A1025125, |
| | correspond to the positions of nucleotide residues shown in SEQ ID | AA040434 |
| | NO:426, and where b is greater than or equal to a +14. | |
| 837373 | Preferably excluded from the present invention are one or more | R21137, H67522, AA081145, AA082099, AA082371, AA130000, |
| | polynucleotides comprising a nucleotide sequence described by the | AA130415, AA130417, AA132638, AA136918, AA147401, |
| | general formula of a-b, where a is any integer between 1 to 816 of | AA157404, AA186519, AA186340, AA186565, AA190900, |
| | SEQ ID NO:427, b is an integer of 15 to 830, where both a and b | AA191038, AA190612, AA224065, AA469308, AA514706, |
| | correspond to the positions of nucleotide residues shown in SEQ ID | AA640391, AA659609, AA814425, AA932379, AA961224, |
| | NO:427, and where b is greater than or equal to a +14. | AA974800, AA977316, A1002396, N83374, N83520, N83658, |
| | | N83770, N85953, N85954, N86486, N86566, N86680, N87938, |
| | | N88164, N89316, C14148, C14189, AA095113, AA206109 |
| 837687 | Preferably excluded from the present invention are one or more | |
| | polynucleotides comprising a nucleotide sequence described by the | |
| | general formula of a-b, where a is any integer between 1 to 1608 of | |
| | SEQ ID NO:428, b is an integer of 15 to 1622, where both a and b | |
| | correspond to the positions of nucleotide residues shown in SEQ ID | |
| | NO:428, and where b is greater than or equal to a +14. | |
| 837991 | Preferably excluded from the present invention are one or more | |
| | polynucleotides comprising a nucleotide sequence described by the | |
| | general formula of a-b, where a is any integer between 1 to 534 of | |
| | SEQ ID NO:429, b is an integer of 15 to 548, where both a and b | |
| | correspond to the positions of nucleotide residues shown in SEQ ID | |
| | NO:429, and where b is greater than or equal to a +14. | |
| 838442 | Preferably excluded from the present invention are one or more | |
| | polynucleotides comprising a nucleotide sequence described by the | |
| | general formula of a-b, where a is any integer between 1 to 555 of | |
| | SEQ ID NO:430, b is an integer of 15 to 569, where both a and b | |
| | correspond to the positions of nucleotide residues shown in SEQ ID | |
| | NO:430, and where b is greater than or equal to a +14. | |
| 840541 | Preferably excluded from the present invention are one or more | AA205009, AA471299 |
| | polynucleotides comprising a nucleotide sequence described by the | |
| | general formula of a-b, where a is any integer between 1 to 535 of | |
| | SEQ ID NO:431, b is an integer of 15 to 549, where both a and b | |
| | correspond to the positions of nucleotide residues shown in SEQ ID | |
| | NO:431, and where b is greater than or equal to a +14. | |
| 840543 | Preferably excluded from the present invention are one or more | |
| | polynucleotides comprising a nucleotide sequence described by the | |
| | general formula of a-b, where a is any integer between 1 to 1207 of | |
| | SEQ ID NO:432, b is an integer of 15 to 1221, where both a and b | |
| | correspond to the positions of nucleotide residues shown in SEQ ID | |
| | NO:432, and where b is greater than or equal to a +14. | |
| 840550 | Preferably excluded from the present invention are one or more | T53643, T53644, R67842, R67843, R79329, H12321, H40510, |
| | polynucleotides comprising a nucleotide sequence described by the | R83261, R88722, R90978, R97638, H51690, H52190, H78699, |
| | general formula of a-b, where a is any integer between 1 to 1101 of | H89714, N58070, N69832, N98971, AA251228, AA251227, |
| | SEQ ID NO:433, b is an integer of 15 to 1115, where both a and b | AA282101, AA513006, AA528240, AA558167, AA593383, |
| | correspond to the positions of nucleotide residues shown in SEQ ID | AA574200, AA577197, AA765822, AA847143, AA863087, |
| | NO:433, and where b is greater than or equal to a +14, | AA931049, AA694054 |
| 840563 | Preferably excluded from the present invention are one or more | R38732, R71612, R71613, N24083, N31377, N47304, N48623, |
| | polynucleotides comprising a nucleotide sequence described by the | W87303, W90742, W90798, AA011634, AA011635, AA253397, |
| | general formula of a-b, where a is any integer between 1 to 1590 of | AA253501, AA257091, AA257121, AA427877, AA503469, |
| | SEQ ID NO:434, b is an integer of 15 to 1604, where both a and b | AA565303, AA587449, AA613721, AA740312, C01498, |
| | correspond to the positions of nucleotide residues shown in SEQ ID | AA434535, AA443422, AA454584, AA677081, A1022365, |
| | NO:434, and where b is greater than or equal to a +14. | A1052631, AA693545 |
| 840565 | Preferably excluded from the present invention are one or more | |
| | polynucleotides comprising a nucleotide sequence described by the | |
| | general formula of a-b, where a is any integer between 1 to 287 of | |
| | SEQ ID NO:435, b is an integer of 15 to 301, where both a and b | |
| | correspond to the positions of nucleotide residues shown in SEQ ID | |
| | NO:435, and where b is greater than or equal to a +14. | |
| 840569 | Preferably excluded from the present invention are one or more | |
| | polynucleotides comprising a nucleotide sequence described by the | |
| | general formula of a-b, where a is any integer between 1 to 304 of | |
| | SEQ ID NO:436, b is an integer of 15 to 318, where both a and b | |
| | correspond to the positions of nucleotide residues shown in SEQ ID | |
| | NO:436, and where b is greater than or equal to a +14. | |
| 840570 | Preferably excluded from the present invention are one or more | A1075277, AA675912, AA675911 |
| | polynucleotides comprising a nucleotide sequence described by the | |
| | general formula of a-b, where a is any integer between 1 to 1868 of | |
| | SEQ ID NO:437, b is an integer of 15 to 1882, where both a and b | |
| | correspond to the positions of nucleotide residues shown in SEQ ID | |
| | NO:437, and where b is greater than or equal to a +14. | |
| 840571 | Preferably excluded from the present invention are one or more | T47828, T47852, T64841, T65430, T65510, T72584, R17181, |
| | polynucleotides comprising a nucleotide sequence described by the | R19667, R34515, R41731, R44453, R49058, R50770, R51812, |
| | general formula of a-b, where a is any integer between 1 to 2042 of | R41731, R49058, R44453, H11004, H15433, H15488, H28705, |
| | SEQ ID NO:438, b is an integer of 15 to 2056, where both a and b | H28834, AA515873, AA687085, AA863313, AA903803, |
| | correspond to the positions of nucleotide residues shown in SEQ ID | AA452278, AA452447, AA781246, AA972396, AA993822, |
| | NO:438, and where b is greater than or equal to a +14. | AI002821, T10761, D25941, Z41977, Z40833, Z44675, F01498, |
| 840573 | Preferably excluded from the present invention are one or more | AA149788 |
| | polynucleotides comprising a nucleotide sequence described by the | |
| | general formula of a-b, where a is any integer between 1 to 707 of | |
| | SEQ ID NO:439, b is an integer of 15 to 721, where both a and b | |
| | correspond to the positions of nucleotide residues shown in SEQ ID | |
| | NO:439, and where b is greater than or equal to a +14. | |
| 840574 | Preferably excluded from the present invention are one or more | T65588, R40688, R42248, R53793, R53794, R42248, R20733, |
| | polynucleotides comprising a nucleotide sequence described by the | 40688, R66541, R68438, R68439, R77228, R77229, R77595, |
| | general formula of a-b, where a is any integer between 1 to 1027 of | H18969, H20988, H21032, H49673, H50064, N72287, N80600, |
| | SEQ ID NO:440, b is an integer of 15 to 1041, where both a and b | W07440, W40167, AA034401, AA035044, AA035506, |
| | correspond to the positions of nucleotide residues shown in SEQ ID | AA035555, AA182662, AA182740, AA483608, AA588302, |
| | NO:440, and where b is greater than or equal to a +14. | AA602357, AA604612, AA639138, D81410, D81461, D81692, |
| | | AI097583, C15094, AA404494, AA705982, AI080676, AI095724, |
| 840575 | Preferably excluded from the present invention are one or more | W68038, W93774 |
| | polynucleotides comprising a nucleotide sequence described by the | |
| | general formula of a-b, where a is any integer between 1 to 1981 of | |
| | SEQ ID NO:441, b is an integer of 15 to 1995, where both a and b | |
| | correspond to the positions of nucleotide residues shown in SEQ ID | |
| | NO:441, and where b is greater than or equal to a +14. | |
| 840579 | Preferably excluded from the present invention are one or more | R25715, R72972, N42280, N99672, AA046377, AA112337, |
| | polynucleotides comprising a nucleotide sequence described by the | AA137170, AA156083, AA156289, AA234550, AA236661, |
| | general formula of a-b, where a is any integer between 1 to 1709 of | AA251743, AA256954, AA256645, AA704119, AI073518, |
| | SEQ ID NO:442, b is an integer of 15 to 1723, where both a and b | AA773818 |
| | correspond to the positions of nucleotide residues shown in SEQ ID | |
| | NO:442, and where b is greater than or equal to a +14. | |
| 840580 | Preferably excluded from the present invention are one or more | |
| | polynucleotides comprising a nucleotide sequence described by the | |
| | general formula of a-b, where a is any integer between 1 to 1885 of | |
| | SEQ ID NO:443, b is an integer of 15 to 1899, where both a and b | |
| | correspond to the positions of nucleotide residues shown in SEQ ID | |
| | NO:443, and where b is greater than or equal to a +14. | |
| 840581 | Preferably excluded from the present invention are one or more | |
| | polynucleotides comprising a nucleotide sequence described by the | |
| | general formula of a-b, where a is any integer between 1 to 416 of | |
| | SEQ ID NO;444, b is an integer of 15 to 430, where both a and b | |
| | correspond to the positions of nucleotide residues shown in SEQ ID | |
| | NO:444, and where b is greater than or equal to a +14. | |
| 840605 | Preferably excluded from the present invention are one or more | T58718, R60700, R60701, H30380, H30430, N42386, AA126493, |
| | polynucleotides comprising a nucleotide sequence described by the | AA126620, AA128024, AA128067, AA236455, AA234073, |
| | general formula of a-b, where a is any integer between 1 to 2139 of | AA470382, AA503709, AA635761, AA573225, AA573330, |
| | SEQ ID NO:445, b is an integer of 15 to 2153, where both a and b | AA659473, AA807615, AA824445, AA825364, AA888670, |
| | correspond to the positions of nucleotide residues shown in SEQ ID | AA931858, AA935053, AA968889, AA971410, AA973830, |
| | NO:445, and where b is greater than or equal to a +14. | AA974807, AA977019, AA991272, AA975535, C02768, |
| | | AA094041, AA478779, AA478898, AA487854, AA777751, |
| | | AA845416, AA969094, AI027197, AI027391, AI093994, |
| | | AI094088, T24618, T25054, Z41574 |
| 840607 | Preferably excluded from the present invention are one or more | |
| | polynucleotides comprising a nucleotide sequence described by the | |
| | general formula of a-b, where a is any integer between 1 to 478 of | |
| | SEQ ID NO:446, b is an integer of 15 to 492, where both a and b | |
| | correspond to the positions of nucleotide residues shown in SEQ ID | |
| | NO:446, and where b is greater than or equal to a +14. | |
| 840609 | Preferably excluded from the present invention are one or more | |
| | polynucleotides comprising a nucleotide sequence described by the | |
| | general formula of a-b, where a is any integer between 1 to 1525 of | |
| | SEQ ID NO:447, b is an integer of 15 to 1539, where both a and b | |
| | correspond to the positions of nucleotide residues shown in SEQ ID | |
| | NO:447, and where b is greater than or equal to a +14. | |
| 840610 | Preferably excluded from the present invention are one or more | |
| | polynucleotides comprising a nucleotide sequence described by the | |
| | general formula of a-b, where a is any integer between 1 to 3969 of | |
| | SEQ ID NO:448, b is an integer of 15 to 3983, where both a and b | |
| | correspond to the positions of nucleotide residues shown in SEQ ID | |
| | NO:448, and where b is greater than or equal to a +14. | |
| 840611 | Preferably excluded from the present invention are one or more | |
| | polynucleotides comprising a nucleotide sequence described by the | |
| | general formula of a-b, where a is any integer between 1 to 1163 of | |
| | SEQ ID NO:449, b is an integer of 15 to 1177, where both a and b | |
| | correspond to the positions of nucleotide residues shown in SEQ ID | |
| | NO:449, and where b is greater than or equal to a +14. | |
| 840612 | Preferably excluded from the present invention are one or more | |
| | polynucleotides comprising a nucleotide sequence described by the | |
| | general formula of a-b, where a is any integer between 1 to 2414 of | |
| | SEQ ID NO:450, b is an integer of 15 to 2428, where both a and b | |
| | correspond to the positions of nucleotide residues shown in SEQ ID | |
| | NO:450, and where b is greater than or equal to a +14. | |
| 840615 | Preferably excluded from the present invention are one or more | T65122, T65191, R32009, R32056, R69507, R70398, H06201, |
| | polynucleotides comprising a nucleotide sequence described by the | R94284, R94634, H51636, H92705, H99325, N24056, N26430, |
| | general formula of a-b, where a is any integer between 1 to 2471 of | N35932, N39594, N46740, N70376, W88440, AA017294, |
| | SEQ ID NO:451, b is an integer of 15 to 2485, where both a and b | AA115093, AA115094, AA171679, AA173604, AA173857, |
| | correspond to the positions of nucleotide residues shown in SEQ ID | AA233061, AA243856, AA279997, AA419480, AA419595, |
| | NO:451, and where b is greater than or equal to a +14. | AA536095, AA583207, AA588657, AA604241, AA639870, |
| | | AA713580, AA714906, AA730848, AA741 161, AA832122, |
| | | AA879136, AA903032, AA938350, AA948280, AA976706, |
| | | W05017, AA171795, AA401642, AA405839, AA411823, |
| | | AA628174, AA725876, AA725882, AA833521, AA954549, |
| | | AA992844, AI014611, AI018081, AI024440, AI025063, |
| | | AI049677, AI085041, AI090013, AI091784, F11915, F09562, |
| | | AA699825 |
| 840622 | Preferably excluded from the present invention are one or more | |
| | polynucleotides comprising a nucleotide sequence described by the | |
| | general formula of a-b, where a is any integer between 1 to 949 of | |
| | SEQ ID NO:452, b is an integer of 15 to 963, where both a and b | |
| | correspond to the positions of nucleotide residues shown in SEQ ID | |
| | NO:452, and where b is greater than or equal to a +14. | |
| 840623 | Preferably excluded from the present invention are one or more | AA248685 |
| | polynucleotides comprising a nucleotide sequence described by the | |
| | general formula of a-b, where a is any integer between 1 to 590 of | |
| | SEQ ID NO:453, b is an integer of 15 to 604, where both a and b | |
| | correspond to the positions of nucleotide residues shown in SEQ ID | |
| | NO:453, and where b is greater than or equal to a +14. | |
| 840624 | Preferably excluded from the present invention are one or more | N38891, N54665, N45221, F13612, F13702 |
| | polynucleotides comprising a nucleotide sequence described by the | |
| | general formula of a-b, where a is any integer between 1 to 1903 of | |
| | SEQ ID NO:454, b is an integer of 15 to 1917, where both a and b | |
| | correspond to the positions of nucleotide residues shown in SEQ ID | |
| | NO:454, and where b is greater than or equal to a +14. | |
| 840631 | Preferably excluded from the present invention are one or more | |
| | polynucleotides comprising a nucleotide sequence described by the | |
| | general formula of a-b, where a is any integer between 1 to 1524 of | |
| | SEQ ID NO:455, b is an integer of 15 to 1538, where both a and b | |
| | correspond to the positions of nucleotide residues shown in SEQ ID | |
| | NO:455, and where b is greater than or equal to a +14. | |
| 840632 | Preferably excluded from the present invention are one or more | H15848, H16160, H27966, H27967, H42798, H87969, N64073, |
| | polynucleotides comprising a nucleotide sequence described by the | N64076, N64078, AA045740, AA280032, AA280099, AA283727, |
| | general formula of a-b, where a is any integer between 1 to 2175 of | AA290929, AA814009, AA975514, AI094746, AA449900, |
| | SEQ ID NO:456, b is an integer of 15 to 2189, where both a and b | AA716758, AA724921, AA860380, AA909482 |
| | correspond to the positions of nucleotide residues shown in SEQ ID | |
| | NO:456, and where b is greater than or equal to a +14. | |
| 840633 | Preferably excluded from the present invention are one or more | |
| | polynucleotides comprising a nucleotide sequence described by the | |
| | general formula of a-b, where a is any integer between 1 to 1385 of | |
| | SEQ ID NO:457, b is an integer of 15 to 1399, where both a and b | |
| | correspond to the positions of nucleotide residues shown in SEQ ID | |
| | NO:457, and where b is greater than or equal to a +14. | |
| 840634 | Preferably excluded from the present invention are one or more | AA063114 |
| | polynucleotides comprising a nucleotide sequence described by the | |
| | general formula of a-b, where a is any integer between 1 to 695 of | |
| | SEQ ID NO:458, b is an integer of 15 to 709, where both a and b | |
| | correspond to the positions of nucleotide residues shown in SEQ ID | |
| | NO:458, and where b is greater than or equal to a +14. | |
| 840635 | Preferably excluded from the present invention are one or more | |
| | polynucleotides comprising a nucleotide sequence described by the | |
| | general formula of a-b, where a is any integer between 1 to 1269 of | |
| | SEQ ID NO:459, b is an integer of 15 to 1283, where both a and b | |
| | correspond to the positions of nucleotide residues shown in SEQ ID | |
| | NO:459, and where b is greater than or equal to a +14. | |
| 840636 | Preferably excluded from the present invention are one or more | |
| | polynucleotides comprising a nucleotide sequence described by the | |
| | general formula of a-b, where a is any integer between 1 to 421 of | |
| | SEQ ID NO:460, b is an integer of 15 to 435, where both a and b | |
| | correspond to the positions of nucleotide residues shown in SEQ ID | |
| | NO:460, and where b is greater than or equal to a +14. | |
| 840637 | Preferably excluded from the present invention are one or more | AA001547, AA012848, AA012933, AA017085, AA017194, |
| | polynucleotides comprising a nucleotide sequence described by the | AA018490, AA810954 |
| | general formula of a-b, where a is any integer between 1 to 640 of | |
| | SEQ ID NO:461, b is an integer of 15 to 654, where both a and b | |
| | correspond to the positions of nucleotide residues shown in SEQ ID | |
| | NO:461, and where b is greater than or equal to a +14. | |
| 840639 | Preferably excluded from the present invention are one or more | |
| | polynucleotides comprising a nucleotide sequence described by the | |
| | general formula of a-b, where a is any integer between 1 to 2231 of | |
| | SEQ ID NO:462, b is an integer of 15 to 2245, where both a and b | |
| | correspond to the positions of nucleotide residues shown in SEQ ID | |
| | NO:462, and where b is greater than or equal to a +14. | |
| 840640 | Preferably excluded from the present invention are one or more | |
| | polynucleotides comprising a nucleotide sequence described by the | |
| | general formula of a-b, where a is any integer between 1 to 1266 of | |
| | SEQ ID NO:463, b is an integer of 15 to 1280, where both a and b | |
| | correspond to the positions of nucleotide residues shown in SEQ ID | |
| | NO:463, and where b is greater than or equal to a +14. | |
| 840650 | Preferably excluded from the present invention are one or more | |
| | polynucleotides comprising a nucleotide sequence described by the | |
| | general formula of a-b, where a is any integer between 1 to 2417 of | |
| | SEQ ID NO:464, b is an integer of 15 to 2431, where both a and b | |
| | correspond to the positions of nucleotide residues shown in SEQ ID | |
| | NO:464, and where b is greater than or equal to a +14. | |
| 840652 | Preferably excluded from the present invention are one or more | |
| | polynucleotides comprising a nucleotide sequence described by the | |
| | general formula of a-b, where a is any integer between 1 to 575 of | |
| | SEQ ID NO:465, b is an integer of 15 to 589, where both a and b | |
| | correspond to the positions of nucleotide residues shown in SEQ ID | |
| | NO:465, and where b is greater than or equal to a +14. | |
| 840653 | Preferably excluded from the present invention are one or more | |
| | polynucleotides comprising a nucleotide sequence described by the | |
| | general formula of a-b, where a is any integer between 1 to 1093 of | |
| | SEQ ID NO:466, b is an integer of 15 to 1107, where both a and b | |
| | correspond to the positions of nucleotide residues shown in SEQ ID | |
| | NO:466, and where b is greater than or equal to a +14. | |
| 840655 | Preferably excluded from the present invention are one or more | |
| | polynucleotides comprising a nucleotide sequence described by the | |
| | general formula of a-b, where a is any integer between 1 to 2183 of | |
| | SEQ ID NO:467, b is an integer of 15 to 2197, where both a and b | |
| | correspond to the positions of nucleotide residues shown in SEQ ID | |
| | NO:467, and where b is greater than or equal to a +14. | |
| 840659 | Preferably excluded from the present invention are one or more | |
| | polynucleotides comprising a nucleotide sequence described by the | |
| | general formula of a-b, where a is any integer between 1 to 3597 of | |
| | SEQ ID NO:468, his an integer of 15 to 3611, where both a and b | |
| | correspond to the positions of nucleotide residues shown in SEQ ID | |
| | NO:468, and where b is greater than or equal to a +14. | |
| 840660 | Preferably excluded from the present invention are one or more | AA253121, AA253250 |
| | polynucleotides comprising a nucleotide sequence described by the | |
| | general formula of a-b, where a is any integer between 1 to 506 of | |
| | SEQ ID NO:469, b is an integer of 15 to 520, where both a and b | |
| | correspond to the positions of nucleotide residues shown in SEQ ID | |
| | NO:469, and where b is greater than or equal to a +14. | |
| 840661 | Preferably excluded from the present invention are one or more | R40087, AA483309, AA720883, AA747744, AA811974, |
| | polynucleotides comprising a nucleotide sequence described by the | AA853049 |
| | general formula of a-b, where a is any integer between 1 to 865 of | |
| | SEQ ID NO:470, b is an integer of 15 to 879, where both a and b | |
| | correspond to the positions of nucleotide residues shown in SEQ ID | |
| | NO:470, and where b is greater than or equal to a +14. | |
| 840662 | Preferably excluded from the present invention are one or more | R13355, R21688, R23614, R26167, R40871, R46580, R46580, |
| | polynucleotides comprising a nucleotide sequence described by the | R40871, R67867, R67868, H01101, H01102, H01867, H01868, |
| | general formula of a-b, where a is any integer between 1 to 2543 of | H02834, H03726, H93708, H95440, H95441, N53845, N66438, |
| | SEQ ID NO:471, b is an integer of 15 to 2557, where both a and b | N68125, N69039, N73342, AA045604, AA045603, AA101337, |
| | correspond to the positions of nucleotide residues shown in SEQ ID | AA100423, AA101346, AA101345, AA156296, AA157481, |
| | NO:471, and where b is greater than or equal to a +14. | AA158453, AA158452, AA181954, AA187577, AA428908, |
| | | AA281008, AA281174, AA551925, AA557463, AA588077, |
| | | AA742447, AA768547, AA814696, AA991197, A1017348, |
| | | C05887, C06049, AA093441, AA496804, AA599560, |
| 840663 | Preferably excluded from the present invention are one or more | |
| | polynucleotides comprising a nucleotide sequence described by the | |
| | general formula of a-b, where a is any integer between 1 to 453 of | |
| | SEQ ID NO:472, b is an integer of 15 to 467, where both a and b | |
| | correspond to the positions of nucleotide residues shown in SEQ ID | |
| | NO:472, and where b is greater than or equal to a +14. | |
| 840670 | Preferably excluded from the present invention are one or more | T71092, T67636, R08286, H13339, H16147, H25692, H38182, |
| | polynucleotides comprising a nucleotide sequence described by the | R84798, R98981, N79217, W19493, W25579, AA034100, |
| | general formula of a-b, where a is any integer between 1 to 1826 of | AA056965, AA262921, AA720972, AA768301, AA825825, |
| | SEQ ID NO:473, b is an integer of 15 to 1840, where both a and b | AA972578, AA094484, AA394311, AA487380, AA778203, |
| | correspond to the positions of nucleotide residues shown in SEQ ID | AI004258, AI005389, Z39071, Z42947, F02333, F06078, |
| | NO:473, and where b is greater than or equal to a +14. | AA682274 |
| 840671 | Preferably excluded from the present invention are one or more | R46252, R46252, N49076, W04352, W86176, W86177, W92672, |
| | polynucleotides comprising a nucleotide sequence described by the | W92692, W93417, AA029831, AA085198, AA464962, |
| | general formula of a-b, where a is any integer between 1 to 1244 of | AA633124, AA737628, AA737662, AA780382, AA811098, |
| | SEQ ID NO:474, b is an integer of 15 to 1258, where both a and b | AA836105, AA857959, AA994284, AI076231, C01217, |
| | correspond to the positions of nucleotide residues shown in SEQ ID | AA780068, A1004350 |
| | NO:474, and where b is greater than or equal to a +14. | |
| 840672 | Preferably excluded from the present invention are one or more | |
| | polynucleotides comprising a nucleotide sequence described by the | |
| | general formula of a-b, where a is any integer between 1 to 4217 of | |
| | SEQ ID NO:475, b is an integer of 15 to 4231, where both a and b | |
| | correspond to the positions of nucleotide residues shown in SEQ ID | |
| | NO:475, and where b is greater than or equal to a +14. | |
| 840673 | Preferably excluded from the present invention are one or more | |
| | polynucleotides comprising a nucleotide sequence described by the | |
| | general formula of a-b, where a is any integer between 1 to 677 of | |
| | SEQ ID NO:476, b is an integer of 15 to 691, where both a and b | |
| | correspond to the positions of nucleotide residues shown in SEQ ID | |
| | NO:476, and where b is greater than or equal to a +14. | |
| 840674 | Preferably excluded from the present invention are one or more | R51915, R54456, R54458, H18062, H18757, W03838, W77892, |
| | polynucleotides comprising a nucleotide sequence described by the | AA629317, F09686 |
| | general formula of a-b, where a is any integer between 1 to 1404 of | |
| | SEQ ID NO:477, b is an integer of 15 to 1418, where both a and b | |
| | correspond to the positions of nucleotide residues shown in SEQ ID | |
| | NO:477, and where b is greater than or equal to a +14. | |
| 840677 | Preferably excluded from the present invention are one or more | |
| | polynucleotides comprising a nucleotide sequence described by the | |
| | general formula of a-b, where a is any integer between 1 to 1223 of | |
| | SEQ ID NO:478, b is an integer of 15 to 1237, where both a and b | |
| | correspond to the positions of nucleotide residues shown in SEQ ID | |
| | NO:478, and where b is greater than or equal to a +14. | |
| 840678 | Preferably excluded from the present invention are one or more | T63520, R75617, R75713, R78802, R79103, H25459, H27826, |
| | polynucleotides comprising a nucleotide sequence described by the | H85479, H85486, H92403, H92620, AA001384, AA001383, |
| | general formula of a-b, where a is any integer between 1 to 1084 of | AA057832, AA235008, AA253050, AA424651, AA430054, |
| | SEQ ID NO:479, b is an integer of 15 to 1098, where both a and b | AA430263, AA287947, AA288014, AA481556, AA491320, |
| | correspond to the positions of nucleotide residues shown in SEQ ID | AA505123, AA548974, AA715297, AA736510, AA747303, |
| | NO:479, and where b is greater than or equal to a +14. | AA748308, AA829746, AA909843, AA916866, AA642031, |
| | | AA211184, AA398153, AA399494, AA477559, AA477676, |
| | | AA782481, AI079168, AI040143, AI080176, AI082310, D12148 |
| 840680 | Preferably excluded from the present invention are one or more | |
| | polynucleotides comprising a nucleotide sequence described by the | |
| | general formula of a-b, where a is any integer between 1 to 670 of | |
| | SEQ ID NO:480, b is an integer of 15 to 684, where both a and b | |
| | correspond to the positions of nucleotide residues shown in SEQ ID | |
| | NO:480, and where b is greater than or equal to a +14. | |
| 840691 | Preferably excluded from the present invention are one or more | T83393, T84298, T84482, R72668, H05782, H06072, H17206, |
| | polynucleotides comprising a nucleotide sequence described by the | AA199607, AA236200, AA234037, AA256784, AA256492, |
| | general formula of a-b, where a is any integer between 1 to 2981 of | AA256503, AA256504, AA255526, AA256710, AA424131, |
| | SEQ ID NO:481, b is an integer of 15 to 2995, where both a and b | AA515794, AA580599, AA748677, AA872189, AA937350, |
| | correspond to the positions of nucleotide residues shown in SEQ ID | AA995072, C00417, AA451719, AA992171, A1091615, F01634, |
| | NO:481, and where b is greater than or equal to a +14. | |
| 840700 | Preferably excluded from the present invention are one or more | N74558, W02490, AA250756, AA721388, AA937643, AA077596, |
| | polynucleotides comprising a nucleotide sequence described by the | AA633788, AA779964, AA812535, AA912417, AA978273, |
| | general formula of a-b, where a is any integer between 1 to 1234 of | AA993172, AA993810, D20826 |
| | SEQ ID NO:482, b is an integer of 15 to 1248, where both a and b | |
| | correspond to the positions of nucleotide residues shown in SEQ ID | |
| | NO:482, and where b is greater than or equal to a +14. | |
| 840701 | Preferably excluded from the present invention are one or more | R72545, H77545, H77546, H91001, W46287, W67764, W67765, |
| | polynucleotides comprising a nucleotide sequence described by the | W72232, W76469, W95399, W95448, AA171990, AA172306, |
| | general formula of a-b, where a is any integer between 1 to 1848 of | AA193490, AA193486, AA215714, AA481093, AA687382, |
| | SEQ ID NO:483, b is an integer of 15 to 1862, where both a and b | AA721070, AA731304, AA765386, AA807488, AA830428, |
| | correspond to the positions of nucleotide residues shown in SEQ ID | AA836173, AA872676, AA903225, AA947751, AA948309, |
| | NO:483, and where b is greater than or equal to a +14. | AA679104, AA708104, AA844037, AA773240, AA906091, |
| 840702 | Preferably excluded from the present invention are one or more | T90642, T83169, R34427, R38259, R46634, R48960, R46634, |
| | polynucleotides comprising a nucleotide sequence described by the | H08738, H42054, H42099, N55339, N58337, N77345, N77705, |
| | general formula of a-b, where a is any integer between 1 to 1650 of | W80824, W80945, AA022974, AA045928, AA047535, |
| | SEQ ID NO:484, b is an integer of 15 to 1664, where both a and b | AA047635, AA129564, AA173541, AA173942, AA189109, |
| | correspond to the positions of nucleotide residues shown in SEQ ID | AA232209, AA232711, AA256680, AA256679, AA661511, |
| | NO:484, and where b is greater than or equal to a +14. | AA877392, AA876721, AA876373, AA977525, W26186, |
| | | AA045814, AA455935, AA629608, AA456404, AA706605, |
| | | AA716649, AA716749, AA777167, AA884059, AA910769, |
| | | AA913276, AI091820, Z30152, Z38891, F05971, F10707 |
| 840705 | Preferably excluded from the present invention are one or more | |
| | polynucleotides comprising a nucleotide sequence described by the | |
| | general formula of a-b, where a is any integer between 1 to 955 of | |
| | SEQ ID NO:485, b is an integer of 15 to 969, where both a and b | |
| | correspond to the positions of nucleotide residues shown in SEQ ID | |
| | NO:485, and where b is greater than or equal to a +14. | |
| 840715 | Preferably excluded from the present invention are one or more | |
| | polynucleotides comprising a nucleotide sequence described by the | |
| | general formula of a-b, where a is any integer between 1 to 2558 of | |
| | SEQ ID NO:486, b is an integer of 15 to 2572, where both a and b | |
| | correspond to the positions of nucleotide residues shown in SEQ ID | |
| | NO:486, and where b is greater than or equal to a +14. | |
| 840717 | Preferably excluded from the present invention are one or more | T79990, R16372, R25837, R32657, R423 17, R46835, R53484, |
| | polynucleotides comprising a nucleotide sequence described by the | R53485, R46835, R42317, R60577, R60630, R71392, R72562, |
| | general formula of a-b, where a is any integer between 1 to 1437 of | H06281, H06328, H10997, H26530, W71994, W76508, W87458, |
| | SEQ ID NO:487, b is an integer of 15 to 1451, where both a and b | W87554, AA029771, AA029772, AA039881, AA039966, |
| | correspond to the positions of nucleotide residues shown in SEQ ID | AA046839, AA047010, AA057673, AA069571, AA069563, |
| | NO:487, and where b is greater than or equal to a +14. | AA524160, AA865941, A1017434, AA649997, AA705373, |
| | | AA776517, A1057398, A1078071, T17221, Z40755, Z45024 |
| 840718 | Preferably excluded from the present invention are one or more | |
| | polynucleotides comprising a nucleotide sequence described by the | |
| | general formula of a-b, where a is any integer between 1 to 1186 of | |
| | SEQ ID NO:488, b is an integer of 15 to 1200, where both a and b | |
| | correspond to the positions of nucleotide residues shown in SEQ ID | |
| | NO:488, and where b is greater than or equal to a +14. | |
| 840719 | Preferably excluded from the present invention are one or more | |
| | polynucleotides comprising a nucleotide sequence described by the | |
| | general formula of a-b, where a is any integer between 1 to 271 of | |
| | SEQ ID NO:489, b is an integer of 15 to 285, where both a and h | |
| | correspond to the positions of nucleotide residues shown in SEQ ID | |
| | NO:489, and where b is greater than or equal to a +14. | |
| 840724 | Preferably excluded from the present invention are one or more | |
| | polynucleotides comprising a nucleotide sequence described by the | |
| | general formula of a-b, where a is any integer between 1 to 668 of | |
| | SEQ ID NO:490, b is an integer of 15 to 682, where both a and h | |
| | correspond to the positions of nucleotide residues shown in SEQ ID | |
| | NO:490, and where b is greater than or equal to a +14. | |
| 840725 | Preferably excluded from the present invention are one or more | T52811, T52812, R55369, R55607, H29580, H29664, N34553, |
| | polynucleotides comprising a nucleotide sequence described by the | N59374, N72870, N76477, N78788, N93946, W03090, W03506, |
| | general formula of a-b, where a is any integer between 1 to 1845 of | W07215, W40445, W99359, W99389, AA031839, AA054995, |
| | SEQ ID NO:491, b is an integer of 15 to 1859, where both a and b | AA120818, AA232731, AA236542, AA424556, AA424653, |
| | correspond to the positions of nucleotide residues shown in SEQ ID | AA514847, AA528821, AA564104, AA808072, AA446773, |
| | NO:491, and where b is greater than or equal to a +14. | AA449408, AA478629, AA644625, Z38400, Z42136 |
| 840727 | Preferably excluded from the present invention are one or more | |
| | polynucleotides comprising a nucleotide sequence described by the | |
| | general formula of a-b, where a is any integer between 1 to 2695 of | |
| | SEQ ID NO:492, b is an integer of 15 to 2709, where both a and b | |
| | correspond to the positions of nucleotide residues shown in SEQ ID | |
| | NO:492, and where b is greater than or equal to a +14. | |
| 840731 | Preferably excluded from the present invention are one or more | H1513, R11731, R12441, R17288, R56469, R60452, H14889, |
| | polynucleotides comprising a nucleotide sequence described by the | H21054, R85192, H78221, H78227, H78420, H78427, N44642, |
| | general formula of a-b, where a is any integer between 1 to 1437 of | N50726, N63598, N74649, N79564, W24822, AA121181, |
| | SEQ ID NO:493, b is an integer of 15 to 1451, where both a and b | AA179753, AA180330, AA210820, AA227204, AA255636, |
| | correspond to the positions of nucleotide residues shown in SEQ ID | AA687763, AA761335, AA948300, AA203176, AA216635, |
| | NO:493, and where b is greater than or equal to a +14. | AA404332, AA434598, AA703138 |
| 840733 | Preferably excluded from the present invention are one or more | |
| | polynucleotides comprising a nucleotide sequence described by the | |
| | general formula of a-b, where a is any integer between 1 to 1254 of | |
| | SEQ ID NO:494, b is an integer of 15 to 1268, where both a and b | |
| | correspond to the positions of nucleotide residues shown in SEQ ID | |
| | NO:494, and where b is greater than or equal to a +14. | |
| 840734 | Preferably excluded from the present invention are one or more | |
| | polynucleotides comprising a nucleotide sequence described by the | |
| | general formula of a-b, where a is any integer between 1 to 370 of | |
| | SEQ ID NO:495, b is an integer of 15 to 384, where both a and b | |
| | correspond to the positions of nucleotide residues shown in SEQ ID | |
| | NO:495, and where b is greater than or equal to a +14. | |
| 840736 | Preferably excluded from the present invention are one or more | W42658, W45183, W78758, W80493, W84630, W84681, |
| | polynucleotides comprising a nucleotide sequence described by the | W87610, W87901, W94898, W91935, AA484859, AA484987, |
| | general formula of a-b, where a is any integer between 1 to 961 of | AA505968, AA640115, AA573309, AA657855, AA659105, |
| | SEQ ID NO:496, b is an integer of 15 to 975, where both a and b | AA659440, AA715002, AA732364, AA740180, AA742752, |
| | correspond to the positions of nucleotide residues shown in SEQ ID | AA746960, AA804898, AA825656, AA825665, AA987818, |
| | NO:496, and where b is greater than or equal to a +14. | N83465, C14070, AA643844, AA652253, F20803, AA432012, |
| | | AA678021, AA733050, AA782910, AA846523, A1076183, |
| | | AI085413, D19829 |
| 840737 | Preferably excluded from the present invention are one or more | T67132, T67133, T87248, H56042, H56119, N25201, N69014, |
| | polynucleotides comprising a nucleotide sequence described by the | AA128513, AA129959, AA4257Q1. AA428551, AA911113, |
| | general formula of a-b, where a is any integer between 1 to 20 | AA976370, AA987472 081047, D80388, D80909, |
| | SEQ ID NO:497, b is an integer of 15 to 2075, where both a a | |
| | correspond to the positions of nucleotide residues shown in SEQ | C14514, C14527, C15539, 283123, AA779369, AA773654, |
| | NO:497, and where b is greater than or equal to a +14. | A1081187, A1091167, A1093159, T24488, AA694308, AA700909 |
| 840739 | Preferably excluded from the present invention are one or more | |
| | polynucleotides comprising a nucleotide sequence described by the | |
| | general formula of a-b, where a is any integer between 1 to 1890 of | |
| | SEQ ID NO:498, b is an integer of 15 to 1904, where both a and b | |
| | correspond to the positions of nucleotide residues shown in SEQ ID | |
| | NO:498, and where b is greater than or equal to a +14. | |
| 840746 | Preferably excluded from the present invention are one or more | R12296, R12807, R16375, R16741, R18738, R38102, R42319, |
| | polynucleotides comprising a nucleotide sequence described by the | R43498, R44177, R51993, R51994, R43498, R43060, R44177, |
| | general formula of a-b, where a is any integer between 1 to 2857 of | R42319, H40121, H40275, N22396, N69345, W37333, W38750, |
| | SEQ ID NO:499, b is an integer of 15 to 2871, where both a and b | AA054559, AA054619, AA131766, AA131779, AA150020, |
| | correspond to the positions of nucleotide residues shown in SEQ ID | AA150085, AA255834, AA548724, AA807007, AA825362, |
| | NO:499, and where b is greater than or equal to a +14. | AA828253, N83830, N85321, N86360, AA205805, AA436905, |
| | | AA709097, AA725018, Z22234, T03480, AI016816, AI093402, |
| 840748 | Preferably excluded from the present invention are one or more | |
| | polynucleotides comprising a nucleotide sequence described by the | |
| | general formula of a-b, where a is any integer between 1 to 1610 of | |
| | SEQ ID NO:500, b is an integer of 15 to 1624, where both a and b | |
| | correspond to the positions of nucleotide residues shown in SEQ ID | |
| | NO:500, and where b is greater than or equal to a +14. | |
| 840750 | Preferably excluded from the present invention are one or more | |
| | polynucleotides comprising a nucleotide sequence described by the | |
| | general formula of a-b, where a is any integer between 1 to 834 of | |
| | SEQ ID NO:501, b is an integer of 15 to 848, where both a and b | |
| | correspond to the positions of nucleotide residues shown in SEQ ID | |
| | NO:501, and where b is reater than or equal to a +14. | |
| 840751 | Preferably excluded from the present invention are one or more | T39881, T40844, T40852, T40854, T40860, T40866, T50407, |
| | polynucleotides comprising a nucleotide sequence described by the | T50538, T55741, T94376, T94464, H27286, H81895, 1194293, |
| | general formula of a-b, where a is any integer between 1 to 3178 of | N78697, N99150, W19295, W21325, W24158, W25537, W45247, |
| | SEQ ID NO:502, b is an integer of 15 to 3192, where both a and b | W72714, W93341, W95026, AA027063, AA065228, AA064926, |
| | correspond to the positions of nucleotide residues shown in SEQ ID | AA070691, AA099952, AA127948, AA127982, AA142908, |
| | NO:502, and where b is greater than or equal to a +14. | AA150910, AA460946, AA461252, AA230313, AA494344, |
| | | AA534955, AA535709, AA557910, AA564147, AA564626, |
| | | AA583542, AA523611, AA594463, AA595987, AA603874, |
| | | AA613440, AA613660, AA635415, AA578985, AA568423, |
| | | AA916523, AA922346, AA935323, AA650041, AA652730, |
| | | AA654746, AA454065, AA486952, AA487075, AA487215, |
| | | AA706108, AA722670, AA846544, AA853055, AA853056, |
| | | AA853392, AA861048, AA991772, A1042420, A1074102, |
| | | AI078712, AI041798, AI095622 |
| 840757 | Preferably excluded from the present invention are one or more | T50000, T50064, T50195, T58356, T58401, T58454, T59152, |
| | polynucleotides comprising a nucleotide sequence described by the | T94178, R06456, R06510, R72766, R72767, H02583, H02966, |
| | general formula of a-b, where a is any integer between 1 to 669 of | H04264, H39892, H41455, H44794, H46477, H46959, H51519, |
| | SEQ ID NO:503, b is an integer of 15 to 683, where both a and b | N45305, N54519, N54756, N63507, N64319, N76221, N94805, |
| | correspond to the positions of nucleotide residues shown in SEQ ID | AA053467, AA056133, AA075160, AA078755, AA078756, |
| | NO:503, and where b is greater than or equal to a +14. | AA079464, AA079463, AA079663, AA079767, AA088705, |
| | | AA100045, AA100739, AA112276, AA112446, AA112416, |
| | | AA113258, AA113355, AA113436, AA115702, AA115703, |
| | | AA127146, AA132371, AA132616, AA147349, AA147400, |
| | | AA151458, AA151459, AA156143, AA156398, AA157076, |
| | | AA157164, AA157503, AA158148, AA158599, AA159018, |
| | | AA159163, AA159790, AA159943, AA160779, AA160885, |
| | | AA160895, AA160910, AA179280, AA181232, AA181237, |
| | | AA181305, AA181255, AA181209, AA181326, AA182784, |
| | | AA187267, AA187185, AA187224, AA187761, AA186497, |
| | | AA186503, AA187019, AA187058, AA187039, AA187079, |
| | | AA188443, AA192753, AA192829, AA192840, AA193199, |
| | | AA193200, AA194570, AA421647, AA427634, AA469030, |
| | | AA480763, AA482684, AA493670, AA501840, AA506094, |
| | | AA507481, AA513173, AA514900, AA515423, AA524000, |
| | | AA526363, AA526377, AA528558, AA528622, AA528762, |
| | | AA533899, AA552652, AA555119, AA564174, AA564196, |
| | | AA582614, AA583793, AA584240, AA588860, AA603073, |
| | | AA604397, AA577162, AA662810, AA689248, AA689277, |
| | | AA714332, AA714522, AA720655, AA729281, AA865192, |
| | | AA888414, AA912488, AA934668, AA936157, AA947503, |
| | | AA953047, AA961820, AA968484, AA976297, AA983436, |
| | | AA988025, AA988424, AA991968, AA975722, A1074486, |
| | | R19276, F19560, N84316, N85047, AA641348, AA641489, |
| | | AA095374, AA095772, AA167520, AA652050, AA654250, |
| | | R21094, F21095, AA434414, AA434512, AA470088, AA471285, |
| | | AA486483, AA669755, AA431412, AA431815, AA434279, |
| | | R22216, AA776904, AA835523, AA844771, AA845270, |
| | | AA846028, AA846115, AA788715, AA861511, AA989575, |
| | | AI027165, AI090099, D19841 |
| 840759 | Preferably excluded from the present invention are one or more | R88018, N46360, N48866 |
| | polynucleotides comprising a nucleotide sequence described by the | |
| | general formula of a-b, where a is any integer between 1 to 2182 of | |
| | SEQ ID NO:504, b is an integer of 15 to 2196, where both a and b | |
| | correspond to the positions of nucleotide residues shown in SEQ ID | |
| | NO:504, and where b is greater than or equal to a +14. | |
| 840760 | Preferably excluded from the present invention are one or more | T73701, T73726, R09199, R09304, R18652, R48578, R48679, |
| | polynucleotides comprising a nucleotide sequence described by the | R73134, H72715, H97957, N56993, N73552, W74357, W76552, |
| | general formula of a-b, where a is any integer between 1 to 935 of | AA278851, AA508168, AA508735, AA512928, AA528091, |
| | SEQ ID NO:505, b is an integer of 15 to 949, where both a and b | AA766418, AA862669, AI003767, AI081289, AA417379, |
| | correspond to the positions of nucleotide residues shown in SEQ ID | AA421192, AA609588, AA706851, AA285337, AA993015, |
| | NO:505, and where b is greater than or equal to a +14. | AI001776, AI082525 |
| 840770 | Preferably excluded from the present invention are one or more | |
| | polynucleotides comprising a nucleotide sequence described by the | |
| | general formula of a-b, where a is any integer between 1 to 351 of | |
| | SEQ ID NO:506, b is an integer of 15 to 365, where both a and b | |
| | correspond to the positions of nucleotide residues shown in SEQ ID | |
| | NO:506, and where b is greater than or equal to a +14. | |
| 840781 | Preferably excluded from the present invention are one or more | T50486, T50620, T92253, T92297, T75117, R13719, R20099, |
| | polynucleotides comprising a nucleotide sequence described by the | R20756, R24896, R32452, R38544, R39672, R66654, R67375, |
| | general formula of a-b, where a is any integer between 1 to 2045 of | R71953, R80144, R80145, H09238, H09239, H49089, H49178, |
| | SEQ ID NO:507, b is an integer of 15 to 2059, where both a and b | H79086, H79087, H81170, H82251, H82354, H94594, H98533, |
| | correspond to the positions of nucleotide residues shown in SEQ ID | H98540, H98561, N23328, N32489, N33553, N34608, N34615, |
| | NO:507, and where b is greater than or equal to a +14. | N35704, N36791, N37062, N45951, N46374, N52614, N55340, |
| | | N77346, N91916, W24093, W32300, W44887, W52202, W69110, |
| | | W69235, W93030, W92919, AA010331, AA010332, AA070031, |
| | | AA070335, AA075063, AA075062, AA085451, AA102617, |
| | | AA113366, AA113445, AA133629, AA133675, AA131776, |
| | | AA131809, AA136710, AA136808, AA151948, AA156555, |
| | | AA157722, AA173681, AA181930, AA187541, AA187547, |
| | | AA188217, AA186364, AA186932, AA459989, AA463983, |
| | | AA464118, AA424144, AA424186, AA430453, AA216418, |
| | | AA524319, AA535579, AA553797, AA582340, AA581875, |
| | | AA586801, AA617881, AA579678, AA737057, AA736930, |
| | | AA761601, AA807605, AA805212, AA809972, AA902407, |
| | | AA902991, AA908502, AA916123, AA932301, AA947441, |
| | | AA991523, N89110, N89294, C03132, AA093540, AA094654, |
| | | AA149916, AA648245, AA447373, AA449202, AA598721, |
| | | AA599096, AA670234, AA722507, AA779120, AA843601, |
| | | AA844334, AA868803, AA906425, AA927243, AI021936, |
| | | AI023003, AI022112, AI057609, AI073779, AI088646, AI093414, |
| | | T17246, T16420, F01940, F02536, F03439, F05682, F06177, |
| | | F06249, F04246, F07152, F07995 |
| 840789 | Preferably excluded from the present invention are one or more | H23265, AA250917, AA789157, AI033562, Z38280, F08582 |
| | polynucleotides comprising a nucleotide sequence described by the | |
| | general formula of a-b, where a is any integer between 1 to 1323 of | |
| | SEQ ID NO:508, b is an integer of 15 to 1337, where both a and b | |
| | correspond to the positions of nucleotide residues shown in SEQ ID | |
| | NO:508, and where b is greater than or equal to a +14. | |
| 840790 | Preferably excluded from the present invention are one or more | H87973, H88155, N66473, AA143034, AA151105, AA528233, |
| | polynucleotides comprising a nucleotide sequence described by the | AA584398, AA864579 |
| | general formula of a-b, where a is any integer between 1 to 717 of | |
| | SEQ ID NO:509, b is an integer of 15 to 731, where both a and b | |
| | correspond to the positions of nucleotide residues shown in SEQ ID | |
| | NO:509, and where b is greater than or equal to a +14. | |
| 840791 | Preferably excluded from the present invention are one or more | H21100, H40810, R89801, AA563736, AA595316, AI056419 |
| | polynucleotides comprising a nucleotide sequence described by the | |
| | general formula of a-b, where a is any integer between 1 to 930 of | |
| | SEQ ID NO:510, b is an integer of 15 to 944, where both a and b | |
| | correspond to the positions of nucleotide residues shown in SEQ ID | |
| | NO:510, and where b is greater than or equal to a +14. | |
| 840798 | Preferably excluded from the present invention are one or more | AA206675, T18945 |
| | polynucleotides comprising a nucleotide sequence described by the | |
| | general formula of a-b, where a is any integer between 1 to 503 of | |
| | SEQ ID NO:511, b is an integer of 15 to 517, where both a and b | |
| | correspond to the positions of nucleotide residues shown in SEQ ID | |
| | NO:511, and where b is greater than or equal to a +14. | |
| 840802 | Preferably excluded from the present invention are one or more | |
| | polynucleotides comprising a nucleotide sequence described by the | |
| | general formula of a-b, where a is any integer between 1 to 3637 of | |
| | SEQ ID NO:512, b is an integer of 15 to 3651, where both a and b | |
| | correspond to the positions of nucleotide residues shown in SEQ ID | |
| | NO:512, and where b is greater than or equal to a +14. | |
| 840803 | Preferably excluded from the present invention are one or more | T98263, R01276, R01777, H87694, N46514, AA064627, |
| | polynucleotides comprising a nucleotide sequence described by the | AA064791, AA076077, AA076159, AA083580, AA176354, |
| | general formula of a-b, where a is any integer between 1 to 1922 of | AA186922, AA188542, AA192936, AA193132, AA234329, |
| | SEQ ID NO:513, b is an integer of 15 to 1936, where both a and b | AA262890, AA284101, AA284046, AA827592, AA635005, |
| | correspond to the positions of nucleotide residues shown in SEQ ID | AI015442, AI015761 |
| | NO:513, and where b is greater than or equal to a +14. | |
| 840809 | Preferably excluded from the present invention are one or more | |
| | polynucleotides comprising a nucleotide sequence described by the | |
| | general formula of a-b, where a is any integer between 1 to 1163 of | |
| | SEQ ID NO:514, b is an integer of 15 to 1177, where both a and b | |
| | correspond to the positions of nucleotide residues shown in SEQ ID | |
| | NO:514, and where b is greater than or equal to a +14. | |
| 840811 | Preferably excluded from the present invention are one or more | T60555 |
| | polynucleotides comprising a nucleotide sequence described by the | |
| | general formula of a-b, where a is any integer between 1 to 918 of | |
| | SEQ ID NO:515, b is an integer of 15 to 932, where both a and b | |
| | correspond to the positions of nucleotide residues shown in SEQ ID | |
| | NO:515, and where b is greater than or equal to a +14. | |
| 840813 | Preferably excluded from the present invention are one or more | |
| | polynucleotides comprising a nucleotide sequence described by the | |
| | general formula of a-b, where a is any integer between 1 to 1145 of | |
| | SEQ ID NO:516, b is an integer of 15 to 1159, where both a and b | |
| | correspond to the positions of nucleotide residues shown in SEQ ID | |
| | NO:516, and where b is greater than or equal to a +14. | |
| 840814 | Preferably excluded from the present invention are one or more | T63362, T63686, T88888, T88889, T84250, T84251, R37080, |
| | polynucleotides comprising a nucleotide sequence described by the | R66483, H27722, H27723, R94403, H53971, H53972, H87801, |
| | general formula of a-b, where a is any integer between 1 to 2437 of | H87857, N46002, N56932, W38961, W52373, AA032177, |
| | SEQ ID NO:517, b is an integer of 15 to 2451, where both a and b | AA032176, AA034375, AA034374, AA042798, AA044611, |
| | correspond to the positions of nucleotide residues shown in SEQ ID | AA044801, AA044666, AA056392, AA056506, AA085500, |
| | NO:517, and where b is greater than or equal to a +14. | AA102623, AA100630, AA100629, AA122020, AA122019, |
| | | AA127357, AA128179, AA126320, AA142870, AA150744, |
| | | AA150871, AA169401, AA186750, AA188493, AA188849, |
| | | AA189134, AA887050, AA740555, AA743649, AA805220, |
| | | AA836673, AA837076, AA878369, AA906612, AA978334, |
| | | AA977667, AA996072, AA640853, AA442873, C75140, |
| | | AA628152, AA707458, AA725734, AA844284, AA868206, |
| 840817 | Preferably excluded from the present invention are one or more | R24111, H13796, H39542, W87508, AA045018, AA055435, |
| | polynucleotides comprising a nucleotide sequence described by the | AA115239, AA137113, AA182593, AA459912, AA598757, |
| | general formula of a-b, where a is any integer between 1 to 975 of | AA772338, AI033925, AI041486, D31101 |
| | SEQ ID NO:518, b is an integer of 15 to 989, where both a and b | |
| | correspond to the positions of nucleotide residues shown in SEQ ID | |
| | NO:518, and where b is greater than or equal to a +14. | |
| 840825 | Preferably excluded from the present invention are one or more | |
| | polynucleotides comprising a nucleotide sequence described by the | |
| | general formula of a-b, where a is any integer between 1 to 3301 of | |
| | SEQ ID NO:519, b is an integer of 15 to 3315, where both a and b | |
| | correspond to the positions of nucleotide residues shown in SEQ ID | |
| | NO:519, and where b is greater than or equal to a +14. | |
| 840826 | Preferably excluded from the present invention are one or more | R12213, T79259, R52573, H90609, N34140, AA007443, |
| | polynucleotides comprising a nucleotide sequence described by the | AA126085, AA203195, AA281452, AA613266, D81536, Z24821 |
| | general formula of a-b, where a is any integer between 1 to 2347 of | |
| | SEQ ID NO:520, b is an integer of 15 to 2361, where both a and b | |
| | correspond to the positions of nucleotide residues shown in SEQ ID | |
| | NO:520, and where b is greater than or equal to a +14. | |
| 840827 | Preferably excluded from the present invention are one or more | |
| | polynucleotides comprising a nucleotide sequence described by the | |
| | general formula of a-b, where a is any integer between 1 to 2507 of | |
| | SEQ ID NO;521, b is an integer of 15 to 2521, where both a and b | |
| | correspond to the positions of nucleotide residues shown in SEQ ID | |
| | NO:521, and where b is greater than or equal to a +14. | |
| 840828 | Preferably excluded from the present invention are one or more | T86672, T86764, T87773, T87774, R35654, R35761, H57667, |
| | polynucleotides comprising a nucleotide sequence described by the | H58507, N80737, W07534, W81050, W80799, W95751, W95521, |
| | general formula of a-b, where a is any integer between 1 to 1289 of | AA040152, AA040816, AA070448, AA213733, AA461551, |
| | SEQ ID NO:522, b is an integer of 15 to 1303, where both a and b | AA460625, AA471038, AA592998, AA662015, AA747769, |
| | correspond to the positions of nucleotide residues shown in SEQ ID | AA827708, AA830241, AA393711, AA400724, F21899, |
| | NO:522, and where b is greater than or equal to a +14. | AI023732, AI033332, AI089332 |
| 840829 | Preferably excluded from the present invention are one or more | T55234, T53974, AA121362, AA121372, F17737, AA614605, |
| | polynucleotides comprising a nucleotide sequence described by the | AA662456, AA832 106, AA939005, AA454502, AA629986, |
| | general formula of a-b, where a is any integer between 1 to 1086 of | AA928745, AA993303, AI017897, AI052396 |
| | SEQ ID NO:523, b is an integer of 15 to 1100, where both a and b | |
| | correspond to the positions of nucleotide residues shown in SEQ ID | |
| | NO:523, and where b is greater than or equal to a +14. | |
| 840831 | Preferably excluded from the present invention are one or more | |
| | polynucleotides comprising a nucleotide sequence described by the | |
| | general formula of a-b, where a is any integer between 1 to 1949 of | |
| | SEQ ID NO:524, b is an integer of 15 to 1963, where both a and b | |
| | correspond to the positions of nucleotide residues shown in SEQ ID | |
| | NO:524, and where b is greater than or equal to a +14. | |
| 840836 | Preferably excluded from the present invention are one or more | R76181, N28426, AA249749, AA249759 |
| | polynucleotides comprising a nucleotide sequence described by the | |
| | general formula of a-b, where a is any integer between 1 to 780 of | |
| | SEQ ID NO:525, b is an integer of 15 to 794, where both a and b | |
| | correspond to the positions of nucleotide residues shown in SEQ ID | |
| | NO:525, and where b is greater than or equal to a +14. | |
| 840837 | Preferably excluded from the present invention are one or more | T77944, R17636, H06632, W48792, W49617, AA121669, |
| | polynucleotides comprising a nucleotide sequence described by the | AA121741, AA876369, D80125, D79630, D79663, AA479160, |
| | general formula of a-b, where a is any integer between 1 to R2585 of | AA773279, Z44214 |
| | SEQ ID NO:526, b is an integer of 15 to 2599, where both a and b | |
| | correspond to the positions of nucleotide residues shown in SEQ ID | |
| | NO:526, and where b is greater than or equal to a +14. | |
| 840838 | Preferably excluded from the present invention are one or more | T64743, R14614, H22783, H41174, H80646, H80683, N55490, |
| | polynucleotides comprising a nucleotide sequence described by the | N69823, N70603, N76977, AA036760, AA054012, AA057377, |
| | general formula of a-b, where a is any integer between 1 to 1291 of | AA837761, AA987287, W04922, AA393640, AA435678, |
| | SEQ ID NO:527, b is an integer of 15 to 1305, where both a and b | AA447554, AA448537, AA447593, AA448073, AA448092, |
| | correspond to the positions of nucleotide residues shown in SEQ ID | AI080255, AI095479 |
| | NO:527, and where b is greater than or equal to a +14. | |
| 840841 | Preferably excluded from the present invention are one or more | R11201, R11254, R36000, R36374, R70779, R70831, R73839, |
| | polynucleotides comprising a nucleotide sequence described by the | R73838, R77816, R78184, H00444, H00487, H12294, H12343, |
| | general formula of a-b, where a is any integer between 1 to 1617 of | H22227, H25152, H41334, H41582, H67783, H83813, N20077, |
| | SEQ ID NO:528, b is an integer of 15 to 1631, where both a and b | N23800, N66638, N94763, W42581, W42593, AA029286, |
| | correspond to the positions of nucleotide residues shown in SEQ ID | AA053585, AA053749, AA056556, AA058414, AA102286, |
| | NO:528, and where b is greater than or equal to a +14. | AA112945, AA158256, AA160853, AA463315, AA464245, |
| | | AA464353, AA426154, AA428022, AA554874, AA555227, |
| | | AA594755, AA569425, AA572786, AA687312, AA721147, |
| | | AA826769, AA907442, AA989227, AA436199, AA436324, |
| | | AA723705, M91501, AA971764, AI057365, AI088555, AI090085, |
| | | AAI095652, AA772791 |
| 840842 | Preferably excluded from the present invention are one or more | |
| | polynucleotides comprising a nucleotide sequence described by the | |
| | general formula of a-b, where a is any integer between 1 to 1930 of | |
| | SEQ ID NO:529, b is an integer of 15 to 1944, where both a and b | |
| | correspond to the positions of nucleotide residues shown in SEQ ID | |
| | NO:529, and where b is greater than or equal to a +14. | |
| 840843 | Preferably excluded from the present invention are one or more | R07636, R07683, R56490, H15484, H57022, H99251, N21556, |
| | polynucleotides comprising a nucleotide sequence described by the | N22947, N29473, N33077, N40267, N41499, N44647, N54167, |
| | general formula of a-b, where a is any integer between 1 to 1411 of | N62284, N67127, N77575, N79824, W72340, W73971, |
| | SEQ ID NO:530, b is an integer of 15 to 1425, where both a and b | AA035483, AA035015, AA099228, AA136670, AA136786, |
| | correspond to the positions of nucleotide residues shown in SEQ ID | AA514951, AA558780, AA581821, AA767243, AA806856, |
| | NO:530, and where b is greater than or equal to a +14. | AA832308, AA922693, D79892, N56078, C14941, AA654492, |
| | | AA477457, AA477583, AA495757, AA495817, AA628697, |
| | | AA628687, AA781710, A1004029, A1033065, A1076145, |
| | | A1076166, A1080265, A1093765 |
| 840845 | Preferably excluded from the present invention are one or more | H85970, H86679, N54585, N76666, W79488, W94055, |
| | polynucleotides comprising a nucleotide sequence described by the | AA012907, AA012992, AA018226, AA040388, AA040483, |
| | general formula of a-b, where a is any integer between 1 to 1452 of | AA235697, AA424720, AA424881, AA468337, AA468480, |
| | SEQ ID NO:531, b is an integer of 15 to 1466, where both a and b | AA470354, AA505886, AA533304, AA535176, AA558028, |
| | correspond to the positions of nucleotide residues shown in SEQ ID | AA565018, AA568581, AA636065, AA569449, AA570195, |
| | NO:531, and where b is greater than or equal to a +14. | AA580697, AA580574, AA769142, AA805257, AA857633, |
| | | AA865266, AA974247, AA976018, AA983662, A1000909, |
| | | A1074491, W94054, AA216680, AA283814, AA283815, |
| | | AA293716, AA399618, AA411154, AA411153, AA430409, |
| | | AA446547, AA446672, AA447405, AA447406, AA665639, |
| | | Z19776, AA722802, AA776558, AA897739, AA773270, |
| | | A1037944, A1056229, A1092063, Z39830, F02213, F04779, |
| | | T65241, F12078, F09717 |
| 840847 | Preferably excluded from the present invention are one or more | T93496, T96330, R33735, R56168, N29545, N47832, N52709, |
| | polynucleotides comprising a nucleotide sequence described by the | AA057861, AA057051, AA256421, AA423938, AA502373, |
| | general formula of a-b, where a is any integer between 1 to 1644 of | AA594835, AA837984, AA937125, AA988563, AA642808, |
| | SEQ ID NO:532, b is an integer of 15 to 1658, where both a and b | C16798, AA653712, D11569, D11567, D11568, D11572, |
| | correspond to the positions of nucleotide residues shown in SEQ ID | AA759006 |
| | NO:532, and where b is greater than or equal to a +14. | |
| 840851 | Preferably excluded from the present invention are one or more | |
| | polynucleotides comprising a nucleotide sequence described by the | |
| | general formula of a-b, where a is any integer between 1 to 2843 of | |
| | SEQ ID NO:533, b is an integer of 15 to 2857, where both a and b | |
| | correspond to the positions of nucleotide residues shown in SEQ ID | |
| | NO:533, and where b is greater than or equal to a +14. | |
| 840853 | Preferably excluded from the present invention are one or more | T77874, T91147, T78073, T79015, 1146575, H77369, N23303, |
| | polynucleotides comprising a nucleotide sequence described by the | N71319, N71370, W30700, W68080, W69637, AA029698, |
| | general formula of a-b, where a is any integer between 1 to 1321 of | AA085548, AA100651, AA100446, AA150243, AA150317, |
| | SEQ ID NO:534, b is an integer of 15 to 1335, where both a and b | AA179448, AA181464, AA187866, AA192778, AA257060, |
| | correspond to the positions of nucleotide residues shown in SEQ ID | AA257151, AA483459, AA633204, AA579660, AA744468, |
| | NO:534, and where b is greater than or equal to a +14. | AA745238, AA806004, AA806728, AA831848, AA832183, |
| | | AA916113, AA916084, AA919159, AA918478, AI000093, |
| | | AA094194, AA478126, AA488653, AA486512, AA598836, |
| | | AA723044, AA844019, AA852336, AA904410, AA969896, |
| | | AI002026, AA694486 |
| 840854 | Preferably excluded from the present invention are one or more | |
| | polynucleotides comprising a nucleotide sequence described by the | |
| | general formula of a-b, where a is any integer between 1 to 2804 of | |
| | SEQ ID NO:535, b is an integer of 15 to 2818, where both a and b | |
| | correspond to the positions of nucleotide residues shown in SEQ ID | |
| | NO:535, and where b is greater than or equal to a +14. | |
| 840858 | Preferably excluded from the present invention are one or more | |
| | polynucleotides comprising a nucleotide sequence described by the | |
| | general formula of a-b, where a is any integer between 1 to 1383 of | |
| | SEQ ID NO:536, b is an integer of 15 to 1397, where both a and b | |
| | correspond to the positions of nucleotide residues shown in SEQ ID | |
| | NO:536, and where b is greater than or equal to a +14. | |
| 840859 | Preferably excluded from the present invention are one or more | T93690, AA046782, AA047471, H70453, W22335 |
| | polynucleotides comprising a nucleotide sequence described by the | |
| | general formula of a-b, where a is any integer between 1 to 1219 of | |
| | SEQ ID NO:537, b is an integer of 15 to 1233, where both a and b | |
| | correspond to the positions of nucleotide residues shown in SEQ ID | |
| | NO:537, and where b is greater than or equal to a +14. | |
| 840863 | Preferably excluded from the present invention are one or more | |
| | polynucleotides comprising a nucleotide sequence described by the | |
| | general formula of a-b, where a is any integer between 1 to 1002 of | |
| | SEQ ID NO:538, b is an integer of 15 to 1016, where both a and b | |
| | correspond to the positions of nucleotide residues shown in SEQ ID | |
| | NO:538, and where b is greater than or equal to a +14. | |
| 840868 | Preferably excluded from the present invention are one or more | AA026007, AA053000, AA053532, AA078821, AA078789, |
| | polynucleotides comprising a nucleotide sequence described by the | AA126106, AA531460, AA553445, AA622619, AA877899, |
| | general formula of a-b, where a is any integer between 1 to 1665 of | W63615, C03141, AA486740, C75022, AA682955, D25821 |
| | SEQ ID NO:539, b is an integer of 15 to 1679, where both a and b | |
| | correspond to the positions of nucleotide residues shown in SEQ ID | |
| | NO:539, and where b is greater than or equal to a +14. | |
| 840869 | Preferably excluded from the present invention are one or more | |
| | polynucleotides comprising a nucleotide sequence described by the | |
| | general formula of a-b, where a is any integer between 1 to 1066 of | |
| | SEQ ID NO:540, b is an integer of 15 to 1080, where both a and b | |
| | correspond to the positions of nucleotide residues shown in SEQ ID | |
| | NO:540, and where b is greater than or equal to a +14. | |
| 840870 | Preferably excluded from the present invention are one or more | |
| | polynucleotides comprising a nucleotide sequence described by the | |
| | general formula of a-b, where a is any integer between 1 to 2245 of | |
| | SEQ ID NO:541, b is an integer of 15 to 2259, where both a and b | |
| | correspond to the positions of nucleotide residues shown in SEQ ID | |
| | NO:541, and where b is greater than or equal to a +14. | |
| 840875 | Preferably excluded from the present invention are one or more | N47871, N51132, N79772, W07271, W40335, AA659745, |
| | polynucleotides comprising a nucleotide sequence described by the | AA454850, AA455191, AA457737, AA480848 |
| | general formula of a-b, where a is any integer between 1 to 1333 of | |
| | SEQ ID NO:542, b is an integer of 15 to 1347, where both a and b | |
| | correspond to the positions of nucleotide residues shown in SEQ ID | |
| | NO:542, and where b is greater than or equal to a +14. | |
| 840876 | Preferably excluded from the present invention are one or more | H40365, N30582, N57227, AA099212, AA143504, AA429979, |
| | polynucleotides comprising a nucleotide sequence described by the | AA489199, AA490948, AA503094, AA515940, AA5 15972, |
| | general formula of a-b, where a is any integer between 1 to 1887 of | AA526974, AA565952, AA832525, AA847119, AA975937, |
| | SEQ ID NO:543, b is an integer of 15 to 1901, where both a and b | C16546, AA205184, AA446121, AA446243, AA446429, |
| | correspond to the positions of nucleotide residues shown in SEQ ID | AI093502, T25068 |
| | NO:543, and where b is greater than or equal to a +14. | |
| 840881 | referably excluded from the present invention are one or more | N31249, N33927, N49638, AA169623, AA885642, AA885643, |
| | polynucleotides comprising a nucleotide sequence described by the | AA995981, D80629, AA654491 |
| | general formula of a-b, where a is any integer between 1 to 828 of | |
| | SEQ ID NO:544, b is an integer of 15 to 842, where both a and b | |
| | correspond to the positions of nucleotide residues shown in SEQ ID | |
| | NO:544, and where b is greater than or equal to a +14. | |
| 840883 | Preferably excluded from the present invention are one or more | |
| | polynucleotides comprising a nucleotide sequence described by the | |
| | general formula of a-b, where a is any integer between 1 to 764 of | |
| | SEQ ID NO:545, b is an integer of 15 to 778, where both a and b | |
| | correspond to the positions of nucleotide residues shown in SEQ ID | |
| | NO:545, and where b is greater than or equal to a +14. | |
| 840886 | Preferably excluded from the present invention are one or more | |
| | polynucleotides comprising a nucleotide sequence described by the | |
| | general formula of a-b, where a is any integer between 1 to 2128 of | |
| | SEQ ID NO:546, b is an integer of 15 to 2142, where both a and b | |
| | correspond to the positions of nucleotide residues shown in SEQ ID | |
| | NO:546, and where b is greater than or equal to a +14. | |
| 840887 | Preferably excluded from the present invention are one or more | |
| | polynucleotides comprising a nucleotide sequence described by the | |
| | general formula of a-b, where a is any integer between 1 to 1879 of | |
| | SEQ ID NO:547, b is an integer of 15 to 1893, where both a and b | |
| | correspond to the positions of nucleotide residues shown in SEQ ID | |
| | NO:547, and where b is greater than or equal to a +14. | |
| 840891 | Preferably excluded from the present invention are one or more | AA011494, AA036641, AA040117, AA464582, AA229586, |
| | polynucleotides comprising a nucleotide sequence described by the | AA514441, AA557363, AA605134, AA632063, AA569111, |
| | general formula of a-b, where a is any integer between 1 to 616 of | AA731914, AA764872, AA834230, AA865217, AA865800, |
| | SEQ ID NO:548, b is an integer of 15 to 630, where both a and b | AA931605, AA975800, AA476216, AA477563, AA664440, |
| | correspond to the positions of nucleotide residues shown in SEQ ID | AA906128, AA909907, AA994640, A1024748, AA701389 |
| | NO:548, and where b is greater than or equal to a +14. | |
| 840892 | Preferably excluded from the present invention are one or more | T78188, H72434, H81179, N27050, N31296, N56740, N98857, |
| | polynucleotides comprising a nucleotide sequence described by the | W92285, AA010281, AA017504, AA018836, AA053984 |
| | general formula of a-b, where a is any integer between 1 to 572 of | |
| | SEQ ID NO:549, b is an integer of 15 to 586, where both a and b | |
| | correspond to the positions of nucleotide residues shown in SEQ ID | |
| | NO:549, and where b is greater than or equal to a +14. | |
| 840894 | Preferably excluded from the present invention are one or more | R13791, R18500, R19446, R19717, R26638, R34992, R37650, |
| | polynucleotides comprising a nucleotide sequence described by the | R41499, R44273, R44694, R49667, R41499, R44273, R44694, |
| | general formula of a-b, where a is any integer between 1 to 1572 of | R49667, H10866, H21080, H21081, H24215, H24216, H56529, |
| | SEQ ID NO:550, b is an integer of 15 to 1586, where both a and b | H82728, H83602, H97231, H98771, N23492, N25150, N28896, |
| | correspond to the positions of nucleotide residues shown in SEQ ID | N52055, N55071, N58330, N77279, N77697, N80782, N80789, |
| | NO:550, and where b is greater than or equal to a +14. | W68363, W68498, AA035669, AA063521, AA099156, |
| | | AA099254, AA100828, AA115528, AA115527, AA122370, |
| | | AA121425, AA134022, AA131828, AA131994, AA151142, |
| | | AA151141, AA1500S1, AA150036, AA197292, AA234967, |
| | | AA234148, AA252624, AA419370, AA425774, AA426238, |
| | | AA429953, AA244068, AA244221, AA291229, AA508903, |
| | | AA521037, AA521047, AA558219, AA639444, AA730255, |
| | | AA738405, AA764865, AA769630, AA808135, AA866207, |
| | | AA875854, AA886233, AA911989, AA912330, AA918110, |
| | | AA933817, AA960949, AA961737, AA970707, AA983973, |
| | | AI084859, N87221, AA642352, C15736, AA095273, AA206988, |
| | | AA649545, AA410978, AA443533, AA446839, AA599172, |
| | | AA599632, AA625694, AA668705, AA678761, AA679282, |
| | | AA843723, AI041402, AI041859, AI090256, Z40745, F03594, |
| | | R03920, F07349, F07665, F07689, D12052, AA702844 |
| 840896 | Preferably excluded from the present invention are one or more | T70566, T70837, R34229, R77683, H72423, N70430, W78960, |
| | polynucleotides comprising a nucleotide sequence described by the | W80454, AA157568, AA425171, A1081752, AA450124, |
| | general formula of a-b, where a is any integer between 1 to 2129 of | AA450190, AA479929, AA626156, A1023982, A1079467, D20574 |
| | SEQ ID NO:551, b is an integer of 15 to 2143, where both a and b | |
| | correspond to the positions of nucleotide residues shown in SEQ ID | |
| | NO;551, and where b is greater than or equal to a +14. | |
| 840897 | referably excluded from the present invention are one or more | R08644, AA085919, AA085920, AA112589, AA291296, |
| | polynucleotides comprising a nucleotide sequence described by the | AA531553, AA534454, AA610556, AA632339, AA826535, |
| | general formula of a-b, where a is any integer between 1 to 1620 of | AA873598, AA973899, A1000209, W22275, AA642711, |
| | SEQ ID NO:552, b is an integer of 15 to 1634, where both a and b | AA285014, AA290836, AA291785, AA487868, AA487869, |
| | correspond to the positions of nucleotide residues shown in SEQ ID | AA598896, AA732931, D20744 |
| | NO:552, and where b is greater than or equal to a +14. | |
| 840898 | Preferably excluded from the present invention are one or more | |
| | polynucleotides comprising a nucleotide sequence described by the | |
| | general formula of a-b, where a is any integer between 1 to 264 of | |
| | SEQ ID NO:553, b is an integer of 15 to 278, where both a and b | |
| | correspond to the positions of nucleotide residues shown in SEQ ID | |
| | NO:553, and where b is greater than or equal to a +14. | |
| 840904 | Preferably excluded from the present invention are one or more | |
| | polynucleotides comprising a nucleotide sequence described by the | |
| | general formula of a-b, where a is any integer between 1 to 2644 of | |
| | SEQ ID NO:554, b is an integer of 15 to 2658, where both a and b | |
| | correspond to the positions of nucleotide residues shown in SEQ ID | |
| | NO:554, and where b is greater than or equal to a +14. | |
| 840905 | Preferably excluded from the present invention are one or more | |
| | polynucleotides comprising a nucleotide sequence described by the | |
| | general formula of a-b, where a is any integer between 1 to 1714 of | |
| | SEQ ID NO:555, b is an integer of 15 to 1728, where both a and b | |
| | correspond to the positions of nucleotide residues shown in SEQ ID | |
| | NO:555, and where b is greater than or equal to a +14. | |
| 840908 | Preferably excluded from the present invention are one or more | |
| | polynucleotides comprising a nucleotide sequence described by the | |
| | general formula of a-b, where a is any integer between 1 to 3341 of | |
| | SEQ ID NO:556, b is an integer of 15 to 3355, where both a and b | |
| | correspond to the positions of nucleotide residues shown in SEQ ID | |
| | NO:556, and where b is greater than or equal to a +14. | |
| 840909 | Preferably excluded from the present invention are one or more | N26769, N30855, N91934, W17097, W76127, AA010929, |
| | polynucleotides comprising a nucleotide sequence described by the | AA011317, AA026824, AA026957, AA065084, AA064997, |
| | general formula of a-b, where a is any integer between 1 to 1065 of | AA113980, AA113972, AA187311, AA187412, AA491244, |
| | SEQ ID NO:557, b is an integer of 15 to 1079, where both a and b | AA503832, AA527886, AA603076, AA767201, AA768552, |
| | correspond to the positions of nucleotide residues shown in SEQ ID | AA806008, AA857130, AA862053, W69334, N90880, |
| | NO:557, and where b is greater than or equal to a +14. | AA853981, AA971357, AI015443, AI037999, AI089498, F04542 |
| 840910 | Preferably excluded from the present invention are one or more | |
| | polynucleotides comprising a nucleotide sequence described by the | |
| | general formula of a-b, where a is any integer between 1 to 710 of | |
| | SEQ ID NO:558, b is an integer of 15 to 724, where both a and b | |
| | correspond to the positions of nucleotide residues shown in SEQ ID | |
| | NO:558, and where b is greater than or equal to a +14. | |
| 840912 | Preferably excluded from the present invention are one or more | T89929, T97560, T97607, T98767, T98768, R75684, R76638 |
| | polynucleotides comprising a nucleotide sequence described by the | H29662, R91419, H63674, H84562, N22625, N23668, N59616, |
| | general formula of a-b, where a is any integer between 1 to 3111 of | N67124, N75308, N78169, W04760, W15411, W15522, W31605, |
| | SEQ ID NO:559, b is an integer of 15 to 3125, where both a and b | W39524, AA007425, AA007426, AA044991, AA044990, |
| | correspond to the positions of nucleotide residues shown in SEQ ID | AA161382, AA161383, AA190884, AA190852, AA195140, |
| | NO:559, and where b is greater than or equal to a +14. | AA195346, AA195347, AA278498, AA515881, AA523692, |
| | | AA557400, AA579985, AA732611, AA813932, A1053747, |
| | | D80095, D80559, D80940, D82547, D82557, D82494, C01801, |
| | | R29401, AA404683, AA404214, AA634226, AA456641, |
| | | AA812584, AA884056, AI004948, AI033808, AI038706, |
| | | AI073466, D20935, Z40790, Z45057, F02232, F05993, |
| 840916 | Preferably excluded from the present invention are one or more | |
| | polynucleotides comprising a nucleotide sequence described by the | |
| | general formula of a-b, where a is any integer between 1 to 2631 of | |
| | SEQ ID NO:5 60, b is an integer of 15 to 2645, where both a and b | |
| | correspond to the positions of nucleotide residues shown in SEQ ID | |
| | NO:560, and where b is greater than or equal to a +14. | |
| 840917 | Preferably excluded from the present invention are one or more | H30515, H58512, AA428216, AA429793, AA888482, AA402294, |
| | polynucleotides comprising a nucleotide sequence described by the | AA478415, AA665865, A1079558 |
| | general formula of a-b, where a is any integer between 1 to 1703 of | |
| | SEQ ID NO:561, b is an integer of 15 to 1717, where both a and b | |
| | correspond to the positions of nucleotide residues shown in SEQ ID | |
| | NO:561, and where b is greater than or equal to a +14. | |
| 840918 | Preferably excluded from the present invention are one or more | T63366, T63794, T63819, 172173, 172951, T74098, T74471, |
| | polynucleotides comprising a nucleotide sequence described by the | R40321, R54813, R40321, H28292, H87420, H96805, T499895, |
| | general formula of a-b, where a is any integer between 1 to 2403 of | H99896, N21575, N26498, N35550, N35899, N43971, N46316, |
| | SEQ ID NO:562, b is an integer of 15 to 2417, where both a and b | N50289, N62230, N67269, N67736, N79322, W03582, W20379, |
| | correspond to the positions of nucleotide residues shown in SEQ ID | W351 14, W93987, W93993, W93961, AA002131, AA002085, |
| | NO:562, and where b is greater than or equal to a +14. | AA010861, AA010895, AA032150, AA039874, AA046207, |
| | | AA046213, AA075922, AA076246, AA076245, AA082698, |
| | | AA100666, AA100665, AA102690, AA101322, AA115198, |
| | | AA115199, AA127068, AA125791, AA130142, AA130164, |
| | | AA160133, AA160152, AA181132, AA223399, AA223717, |
| | | AA223794, AA225618, AA225617, AA225893, AA226087, |
| | | AA281188, AA467866, AA532633, AA548553, AA548715, |
| | | AA565709, AA595388, AA604287, AA610139, AA574387, |
| | | AA574403, AA576771, AA827594, AA857936, AA862174, |
| | | AA886789, AA894576, AA933053, AA961640, AA962084, |
| | | AA971648, A1017658, A1089036, U48642, A1084032, W29098, |
| | | AA041518, AA206338, AA206730, AA204730, AA218606, |
| | | AA285284, AA293327, D11555, AA450117, AA626655, |
| | | AA666366, AA679791, AA844183, AA883770, AA904568, |
| | | AA904956, AA913275, AA913772, Z39779, F06739, F07232 |
| 840922 | Preferably excluded from the present invention are one or more | |
| | polynucleotides comprising a nucleotide sequence described by the | |
| | general formula of a-b, where a is any integer between 1 to 1530 of | |
| | SEQ ID NO:563, b is an integer of 15 to 1544, where both a and b | |
| | correspond to the positions of nucleotide residues shown in SEQ ID | |
| | NO:563, and where b is greater than or equal to a +14. | |
| 840923 | Preferably excluded from the present invention are one or more | |
| | polynucleotides comprising a nucleotide sequence described by the | |
| | general formula of a-b, where a is any integer between 1 to 2285 of | |
| | SEQ ID NO:564, b is an integer of 15 to 2299, where both a and b | |
| | correspond to the positions of nucleotide residues shown in SEQ ID | |
| | NO:564, and where b is greater than or equal to a +14. | |
| 840927 | Preferably excluded from the present invention are one or more | |
| | polynucleotides comprising a nucleotide sequence described by the | |
| | general formula of a-b, where a is any integer between 1 to 350 of | |
| | SEQ ID NO:565, b is an integer of 15 to 364, where both a and b | |
| | correspond to the positions of nucleotide residues shown in SEQ ID | |
| | NO:565, and where b is greater than or equal to a +14. | |
| 840928 | Preferably excluded from the present invention are one or more | R52991, R52992, AA075795, AA236859, AA237058, AA258294, |
| | polynucleotides comprising a nucleotide sequence described by the | AA490530, AA582199, AA594981, AA768625, AA918784, |
| | general formula of a-b, where a is any integer between 1 to 2467 of | AA400122, AA400211, AA599540, AA620310, AA757241, |
| | SEQ ID NO:566, b is an integer of 15 to 2481, where both a and b | AA853706, Z44647 |
| | correspond to the positions of nucleotide residues shown in SEQ ID | |
| | NO:566, and where b is greater than or equal to a +14. | |
| 840929 | Preferably excluded from the present invention are one or more | T65391, T65468, T82268, T83555, R23120, R23121, H05767, |
| | polynucleotides comprising a nucleotide sequence described by the | R15242, H15243, N27484, N75846, W07429, W55965, W55966, |
| | general formula of a-b, where a is any integer between 1 to 1350 of | W69486, W69610, AA024480, AA024481, AA035363, |
| | SEQ ID NO:567, b is an integer of 15 to 1364, where both a and b | AA035364, AA036732, AA045784, AA045785, AA054537, |
| | correspond to the positions of nucleotide residues shown in SEQ ID | AA054576, AA058867, AA081962, AA082833, AA122107, |
| | NO:567, and where b is greater than or equal to a +14. | AA122108, AA160026, AA506569, AA582633, AA593717, |
| | | AA593757, AA596048, AA741487, AA830268, AA834091, |
| | | AA917654, AA922770, AA948018, C00527, AA648362, |
| | | AA448872, AA447937, AA708846, AA769947, AA775569, |
| | | AA835167, A1090227, F02032, F11824, F09473 |
| 840930 | Preferably excluded from the present invention are one or more | T66390, R13067, R20192, R40498, R44978, R54122, R40498, |
| | polynucleotides comprising a nucleotide sequence described by the | R44978, R55825, R55910, R56182, H05938, H10239, H13040, |
| | general formula of a-b, where a is any integer between 1 to 1592 of | H22780, H22987, H26826, H28018, R84898, R85844, N48284, |
| | SEQ ID NO:568, b is an integer of 15 to 1606, where both a and b | N49013, W59970, AA029938, AA030050, AA037606, AA040869, |
| | correspond to the positions of nucleotide residues shown in SEQ ID | AA043138, AA147575, AA152015, AA152022, AA152089, |
| | NO:568, and where b is greater than or equal to a +14. | AA152096, AA150150, AA152219, AA156446, AA429964, |
| | | AA470402, AA528114, AA594982, AA595134, AA886444, |
| | | AA972352, F18878, C04576, AA090702, C16326, AA649510, |
| | | AA211287, AA211332, AA443358, AA446384, AA666350, |
| | | AA993887, A1032649, A1096674, Z24984, Z25108, Z25360, |
| 840931 | Preferably excluded from the present invention are one or more | AA164298, AA164299, AA215696, AA553729, AA600053 |
| | polynucleotides comprising a nucleotide sequence described by the | |
| | general formula of a-b, where a is any integer between 1 to 1371 of | |
| | SEQ ID NO:569, b is an integer of 15 to 1385, where both a and b | |
| | correspond to the positions of nucleotide residues shown in SEQ ID | |
| | NO:569, and where b is greater than or equal to a +14. | |
| 840941 | Preferably excluded from the present invention are one or more | T71972, T72113, N66952, AA037833, AA037834, AA503937, |
| | polynucleotides comprising a nucleotide sequence described by the | AA514259, AA568671, C04493, AA400259, AA703387, |
| | general formula of a-b, where a is any integer between 1 to 1130 of | AA897154, AA905309, AA991791, AI091736, AI097161, |
| | SEQ ID NO:570, b is an integer of 15 to 1144, where both a and b | AA699338, AA699546 |
| | correspond to the positions of nucleotide residues shown in SEQ ID | |
| | NO:570, and where b is greater than or equal to a +14. | |
| 840944 | Preferably excluded from the present invention are one or more | R53077, R53166, N66228, N66588, N98299, N98791, W52420, |
| | polynucleotides comprising a nucleotide sequence described by the | W58722, AA054166, AA102647, AA101300, AA224382, |
| | general formula of a-b, where a is any integer between 1 to 2740 of | AA224448, AA504618, AA504713, AA505965, AA577583, |
| | SEQ ID NO:571, b is an integer of 15 to 2754, where both a and b | AA766244, AA837194, AA936390, AA938580, AA969268, |
| | correspond to the positions of nucleotide residues shown in SEQ ID | AI056953, Z25291, Z28894, T25120 |
| | NO:571, and where b is greater than or equal to a +14. | |
| 840945 | Preferably excluded from the present invention are one or more | |
| | polynucleotides comprising a nucleotide sequence described by the | |
| | general formula of a-b, where a is any integer between 1 to 2643 of | |
| | SEQ ID NO:572, b is an integer of 15 to 2657, where both a and b | |
| | correspond to the positions of nucleotide residues shown in SEQ ID | |
| | NO:572, and where b is greater than or equal to a +14. | |
| 840948 | Preferably excluded from the present invention are one or more | |
| | polynucleotides comprising a nucleotide sequence described by the | |
| | general formula of a-b, where a is any integer between 1 to 2338 of | |
| | SEQ ID NO:573, b is an integer of 15 to 2352, where both a and b | |
| | correspond to the positions of nucleotide residues shown in SEQ ID | |
| | NO:573, and where b is greater than or equal to a +14. | |
| 840949 | Preferably excluded from the present invention are one or more | |
| | polynucleotides comprising a nucleotide sequence described by the | |
| | general formula of a-b, where a is any integer between 1 to 314 of | |
| | SEQ ID NO:574, b is an integer of 15 to 328, where both a and b | |
| | correspond to the positions of nucleotide residues shown in SEQ ID | |
| | NO:574, and where b is greater than or equal to a +14. | |
| 840953 | Preferably excluded from the present invention are one or more | |
| | polynucleotides comprising a nucleotide sequence described by the | |
| | general formula of a-b, where a is any integer between 1 to 1664 of | |
| | SEQ ID NO:575, b is an integer of 15 to 1678, where both a and b | |
| | correspond to the positions of nucleotide residues shown in SEQ ID | |
| | NO:575, and where b is greater than or equal to a +14. | |
| 840954 | Preferably excluded from the present invention are one or more | T70122, R01108, R01854, R26511, R50976, W39281, W88823, |
| | polynucleotides comprising a nucleotide sequence described by the | AA190914, AA220964, AA223912, AA224067, AA292591, |
| | general formula of a-b, where a is any integer between 1 to 2494 of | AA516293, AA888082, AA093864, AA644303, AA668429, |
| | SEQ ID NO:576, b is an integer of 15 to 2508, where both a and b | AA680062, AA705885, Z25045, Z25169, Z28742, Z40110, |
| | correspond to the positions of nucleotide residues shown in SEQ ID | F06996, F00269 |
| | NO:576, and where b is greater than or equal to a +14. | |
| 840958 | Preferably excluded from the present invention are one or more | T92026, T92127, T96602, T99639, R07023, R70248, R74432, |
| | polynucleotides comprising a nucleotide sequence described by the | H24617, H25443, H25488, H25814, H39512, H49218, H49404, |
| | general formula of a-b, where a is any integer between 1 to 1517 of | H85371, H98480, N21621, N28860, N32291, N44577, N93796, |
| | SEQ ID NO:577, b is an integer of 15 to 1531, where both a and b | W19136, W46407, N89924, AA252381, AA252643, AA230168, |
| | correspond to the positions of nucleotide residues shown in SEQ ID | AA251928, AA252509, AA280831, AA281028, AA570114, |
| | NO:577, and where b is greater than or equal to a +14. | AA570316, AA688054, AA731686, AA731363, AA737178, |
| | | AA743784, AA761782, AA805326, AA806145, AA806698, |
| | | AA807626, AA810694, AA811702, AA857654, AA903433, |
| | | AA947731, AA976482, AA977020, D80646, AA448459, |
| | | AA722871, AA834947, AA844661, AA868828, AA912953, |
| | | AA971589, AI032540, AI093489, Z33450 |
| 840960 | Preferably excluded from the present invention are one or more | R80950, R81055, H17096, H17714, H21600, H28031, H39514, |
| | polynucleotides comprising a nucleotide sequence described by the | N25283, N48074, N93030, N93491, AA008164, AA005250, |
| | general formula of a-b, where a is any integer between 1 to 1230 of | AA037756, AA039247, AA062857, AA062864, AA159264, |
| | SEQ ID NO:578, b is an integer of 15 to 1244, where both a and b | AA461323, AA482290, AA523938, AA548271, AA602298, |
| | correspond to the positions of nucleotide residues shown in SEQ ID | AA612800, AA580232, AA878960, AA954638, AA983694, |
| | NO:578, and where b is greater than or equal to a +14. | AA948176, AA452852, AA452868, AA628205, AA629208, |
| 840968 | Preferably excluded from the present invention are one or more | |
| | polynucleotides comprising a nucleotide sequence described by the | |
| | general formula of a-b, where a is any integer between 1 to 2511 of | |
| | SEQ ID NO:579, b is an integer of 15 to 2525, where both a and b | |
| | correspond to the positions of nucleotide residues shown in SEQ ID | |
| | NO:579, and where b is greater than or equal to a +14. | |
| 840969 | Preferably excluded from the present invention are one or more | |
| | polynucleotides comprising a nucleotide sequence described by the | |
| | general formula of a-b, where a is any integer between 1 to 3992 of | |
| | SEQ ID NO:580, b is an integer of 15 to 4006, where both a and b | |
| | correspond to the positions of nucleotide residues shown in SEQ ID | |
| | NO:580, and where b is greater than or equal to a +14. | |
| 840972 | Preferably excluded from the present invention are one or more | |
| | polynucleotides comprising a nucleotide sequence described by the | |
| | general formula of a-b, where a is any integer between 1 to 551 of | |
| | SEQ ID NO:581, b is an integer of 15 to 565, where both a and b | |
| | correspond to the positions of nucleotide residues shown in SEQ ID | |
| | NO:581, and where b is greater than or equal to a +14. | |
| 840973 | Preferably excluded from the present invention are one or more | T92934, T93051, T95827, T95922, R01416, R01417, R14186, |
| | polynucleotides comprising a nucleotide sequence described by the | R40475, R40475, R62217, H02303, H02413, N91928, N92794, |
| | general formula of a-b, where a is any integer between 1 to 2514 of | W19380, W24105, W24106, W92317, W92353, AA009695, |
| | SEQ ID NO:582, b is an integer of 15 to 2528, where both a and b | AA009414, AA016232, AA022718, AA022810, AA031668, |
| | correspond to the positions of nucleotide residues shown in SEQ ID | AA031669, AA135522, AA135584, AA233766, AA233817, |
| | NO:582, and where b is greater than or equal to a +14. | AA468889, AA502015, AA514448, AA524548, AA613782, |
| | | AA740659, AA831839, AA856642, AA865523, AA933090, |
| | | AA937529, AA937525, AA995177, D45313, D80956, C04688, |
| | | AA642850, C15075, C15074, AA652169, AA404513, AA485401, |
| | | AA485562, AA626502, AA703641, AI014270, AI027694, |
| | | AI052552, AI080105, AI094104, Z24781, Z28475, D20204, |
| | | AA699913 |
| 840975 | Preferably excluded from the present invention are one or more | AA187971, AA491557 |
| | polynucleotides comprising a nucleotide sequence described by the | |
| | general formula of a-b, where a is any integer between 1 to 493 of | |
| | SEQ ID NO:583, b is an integer of 15 to 507, where both a and b | |
| | correspond to the positions of nucleotide residues shown in SEQ ID | |
| | NO:583, and where b is greater than or equal to a +14. | |
| 840978 | Preferably excluded from the present invention are one or more | |
| | polynucleotides comprising a nucleotide sequence described by the | |
| | general formula of a-b, where a is any integer between 1 to 1917 of | |
| | SEQ ID NO:584, b is an integer of 15 to 1931, where both a and b | |
| | correspond to the positions of nucleotide residues shown in SEQ ID | |
| | NO:584, and where b is greater than or equal to a +14. | |
| 840980 | Preferably excluded from the present invention are one or more | T91979, T85031, R51511, H08105, H14962, H84344, H95886, |
| | polynucleotides comprising a nucleotide sequence described by the | N67113, AA001485, AA033681, AA045053, AA045054, |
| | general formula of a-b, where a is any integer between ito 1006 of | AA460816, AA548181, AA602217, AA627119, AA919072, |
| | SEQ ID NO:585, b is an integer of 15 to 1020, where both a and b | N85463, AA090718, AA090747, AA205839, AA215860, |
| | correspond to the positions of nucleotide residues shown in SEQ ID | AA889349, AI005058, AI081749 |
| | NO:585, and where b is greater than or equal to a +14. | |
| 840982 | Preferably excluded from the present invention are one or more | |
| | polynucleotides comprising a nucleotide sequence described by the | |
| | general formula of a-b, where a is any integer between 1 to 753 of | |
| | SEQ ID NO:586, b is an integer of 15 to 767, where both a and b | |
| | correspond to the positions of nucleotide residues shown in SEQ ID | |
| | NO:586, and where b is greater than or equal to a +14. | |
| 840985 | Preferably excluded from the present invention are one or more | AA469388, AA469387, AA579307, AA838301 |
| | polynucleotides comprising a nucleotide sequence described by the | |
| | general formula of a-b, where a is any integer between 1 to 833 of | |
| | SEQ ID NO:587, b is an integer of 15 to 847, where both a and b | |
| | correspond to the positions of nucleotide residues shown in SEQ ID | |
| | NO:587, and where b is greater than or equal to a +14. | |
| 840989 | Preferably excluded from the present invention are one or more | T56570, T56419, T74072, H02553, H02636, H05217, H28221, |
| | polynucleotides comprising a nucleotide sequence described by the | H28270, H53671, N24892, N26327, N36312, N39771, N43761, |
| | general formula of a-b, where a is any integer between 1 to 2144 of | W19923, N91268, AA132017, AA132120, AA195204, AA195313, |
| | SEQ ID NO:588, b is an integer of 15 to 2158, where both a and b | AA196452, AA196696, AA227654, AA232501, AA232165, |
| | correspond to the positions of nucleotide residues shown in SEQ ID | AA429770, AA281620, AA281676, AA468179, AA515887, |
| | NO:588, and where b is greater than or equal to a +14. | AA533678, AA581958, AA639446, AA577363, AA579740, |
| | | AA721360, AA729621, AA769527, AA814423, AA826344, |
| | | AA903583, D81898, D81970, C04597, AA216528, AA216535, |
| | | AA442781, AA452285, AA452436, AA709278, AA718938, |
| | | AA771705, AA771724, AA868151, AA993850, A1033921, |
| | | R32830, AA952909, F11180, F11002, F11632 |
| 840991 | Preferably excluded from the present invention are one or more | T81125, N29118, N36444, N46478, AA169588, AA169707, |
| | polynucleotides comprising a nucleotide sequence described by the | AA190390, AA197190, AA465591, AA569663, AA572882, |
| | general formula of a-b, where a is any integer between ito 2285 of | AA927990, A1031844, W26259, W26429, W27367, W27994, |
| | SEQ ID NO:589, b is an integer of 15 to 2299, where both a and b | W28877, AA453067, Z39013, Z42882 |
| | correspond to the positions of nucleotide residues shown in SEQ ID | |
| | NO:5 89, and where b is greater than or equal to a +14. | |
| 840996 | Preferably excluded from the present invention are one or more | R11816, T80577, R18182, R55973, R59293, R61044, H08547, |
| | polynucleotides comprising a nucleotide sequence described by the | H08548, H16428, AA001999, AA001722, AA181466, AA181638, |
| | general formula of a-b, where a is any integer between 1 to 2166 of | AA530935, AA811299, AA774853, AA853584, T48535 |
| | SEQ ID NO:590, b is an integer of 15 to 2180, where both a and b | |
| | correspond to the positions of nucleotide residues shown in SEQ ID | |
| | NO:590, and where b is greater than or equal to a +14. | |
| 840997 | Preferably excluded from the present invention are one or more | H81891, N27695, AA242758, AA242898, AA262282, AA463638, |
| | polynucleotides comprising a nucleotide sequence described by the | AA443047, AA677853 |
| | general formula of a-b, where a is any integer between 1 to 1179 of | |
| | SEQ ID NO:591, b is an integer of 15 to 1193, where both a and b | |
| | correspond to the positions of nucleotide residues shown in SEQ ID | |
| | NO:591, and where b is greater than or equal to a +14. | |
| 840998 | Preferably excluded from the present invention are one or more | H39956, R95173, N21653, N59206, AA126765, W25859, |
| | polynucleotides comprising a nucleotide sequence described by the | AA126814, AA411155, AA479348, AA663608, AA723137, |
| | general formula of a-b, where a is any integer between 1 to 1988 of | AA904646, AA936314 |
| | SEQ ID NO:592, b is an integer of 15 to 2002, where both a and b | |
| | correspond to the positions of nucleotide residues shown in SEQ ID | |
| | NO:592, and where b is greater than or equal to a +14. | |
| 840999 | Preferably excluded from the present invention are one or more | T59001, R38613, AA558946, D80113, AA628765, AA931368, |
| | polynucleotides comprising a nucleotide sequence described by the | AI087859, AI087860, AI088020, AI088042, AI088041, Z41502, |
| | general formula of a-b, where a is any integer between 1 to 1000 of | T59074, P10347 |
| | SEQ ID NO:593, b is an integer of 15 to 1014, where both a and b | |
| | correspond to the positions of nucleotide residues shown in SEQ ID | |
| | NO:593, and where b is greater than or equal to a +14. | |
| 841000 | Preferably excluded from the present invention are one or more | T63281 |
| | polynucleotides comprising a nucleotide sequence described by the | |
| | general formula of a-b, where a is any integer between 1 to 319 of | |
| | SEQ ID NO:594, b is an integer of 15 to 333, where both a and b | |
| | correspond to the positions of nucleotide residues shown in SEQ ID | |
| | NO:594, and where b is greater than or equal to a +14. | |
| 841002 | Preferably excluded from the present invention are one or more | N75236, N79007, W33128, AA044565, AA192107, AA194732, |
| | polynucleotides comprising a nucleotide sequence described by the | AA430142, AA602405, AA732494, AA730246, AA767992, |
| | general formula of a-b, where a is any integer between 1 to 1106 of | AA836339, A1083657, AA206755, AA205076, AA649037, |
| | SEQ ID NO:595, b is an integer of 15 to 1120, where both a and b | AA446467, AA722661, AA993269, AA994380, AI005394, |
| | correspond to the positions of nucleotide residues shown in SEQ ID | AI032012 |
| | NO:595, and where b is greater than or equal to a +14. | |
| 841003 | Preferably excluded from the present invention are one or more | N50091, W78173, W79236, AA758361, AA992853 |
| | polynucleotides comprising a nucleotide sequence described by the | |
| | general formula of a-b, where a is any integer between 1 to 518 of | |
| | SEQ ID NO:596, b is an integer of 15 to 532, where both a and b | |
| | correspond to the positions of nucleotide residues shown in SEQ ID | |
| | NO:596, and where b is greater than or equal to a +14. | |
| 841008 | Preferably excluded from the present invention are one or more | T71281, T71345, T77436, R08136, R08137, R20906, R21385, |
| | polynucleotides comprising a nucleotide sequence described by the | R22903, R39269, R43069, R46481, R51904, R52702, R43069, |
| | general formula of a-b, where a is any integer between 1 to 1480 of | R46481, R43120, R79482, H13227, H18911, H19203, H65049, |
| | SEQ ID NO:597, his an integer of 15 to 1494, where both a and b | H65050, H94075, H96326, H96721, N21076, N21154, N21166, |
| | correspond to the positions of nucleotide residues shown in SEQ ID | N23977, N34347, N42814, N73453, N93204, W02856, W20197, |
| | NO:597, and where b is greater than or equal to a +14. | W38726, W38956, W56890, N90551, AA007554, AA037417, |
| | | AA040911, AA116130, AA116131, AA169544, AA169728, |
| | | AA169445, AA173030, AA210740, AA211832, AA211833, |
| | | AA4120515, AA420563, AA420747, AA420808, AA459156, |
| | | AA469336, AA480571, AA548615, AA554507, AA554716, |
| | | AA559111, AA594680, AA602634, AA568997, AA857653, |
| | | AA938636, AA962481, AA969819, AA988963, C01221, N87866, |
| | | N88166, C06426, C16205, C16225, C16262, C16328, C16346, |
| | | C16567, AA093646, AA094628, AA215845, AA248299, |
| | | AA450084, AA450101, AA450141, AA450164, AA452926, |
| | | AA453098, AA677261, AA704706, AA776452, AA782448, |
| | | AA905622, AI024304, AI027088, T10244, T24104, F10814 |
| 841013 | Preferably excluded from the present invention are one or more | |
| | polynucleotides comprising a nucleotide sequence described by the | |
| | general formula of a-b, where a is any integer between 1 to 2174 of | |
| | SEQ ID NO:598, b is an integer of 15 to 2188, where both a and b | |
| | correspond to the positions of nucleotide residues shown in SEQ ID | |
| | NO:598, and where b is greater than or equal to a +14. | |
| 841014 | Preferably excluded from the present invention are one or more | R13850, R36993, R40384, R49290, R49290, R70449, H20581, |
| | polynucleotides comprising a nucleotide sequence described by the | H22501, H41342, W52797, W63724, AA026917, AA149462, |
| | general formula of a-b, where a is any integer between 1 to 1259 of | AA223955, AA232557, AA416604, AA282009, AA284187, |
| | SEQ ID NO:599, b is an integer of 15 to 1273, where both a and b | AA534348, N83640, W28199, AA641025, AA652459, AA707275, |
| | correspond to the positions of nucleotide residues shown in SEQ ID | D19833 |
| | NO:599, and where b is greater than or equal to a +14. | |
| 841015 | Preferably excluded from the present invention are one or more | T60712, T39204, T40475, T89115, R23975, R42835, R50864, |
| | polynucleotides comprising a nucleotide sequence described by the | R42835, R80780, R80929, R80980, R81030, R81287, H45854, |
| | general formula of a-b, where a is any integer between 1 to 1225 of | R85410, H85126, H85165, H86110, H92458, H92459, H96689, |
| | SEQ ID NO:600, b is an integer of IS to 1239, where both a and b | N45682, N48966, N64273, N67340, W38863, W60856, W73806, |
| | correspond to the positions of nucleotide residues shown in SEQ ID | W79809, W79590, AA031812, AA031892, AA039603, |
| | NO:600, and where b is greater than or equal to a +14. | AA056740, AA05841 1, AA069773, AA069809, AA127774, |
| | | AA133361, AA150512, AA186437, AA188784, AA215296, |
| | | AA236042, AA250827, AA250884, AA258206, AA459963, |
| | | AA480598, AA484831, AA524510, AA554692, AA627856, |
| | | AA633499, AA633500, AA573552, AA577009, AA661865, |
| | | AA838393, AA838126, AA872284, AA888617, AA954248, |
| | | AA972651, AA974294, AA978242, A1000986, N84928, W28888, |
| | | AA093374, AA095419, AA649576, AA447092, AA628724, |
| | | AA635022, AA635099, AA708921, AA782622, AA845435, |
| | | AA852359, AA283454, AA860493, AA905955, A1015482, |
| | | AI033996, AI057611, AI041421, AI097090, T15984, F04083, |
| 841018 | Preferably excluded from the present invention are one or more | |
| | polynucleotides comprising a nucleotide sequence described by the | |
| | general formula of a-b, where a is any integer between 1 to 1272 of | |
| | SEQ ID NO:601, b is an integer of 15 to 1286, where both a and b | |
| | correspond to the positions of nucleotide residues shown in SEQ ID | |
| | NO:601, and where b is greater than or equal to a +14. | |
| 841019 | Preferably excluded from the present invention are one or more | AA248515 |
| | polynucleotides comprising a nucleotide sequence described by the | |
| | general formula of a-b, where a is any integer between 1 to 390 of | |
| | SEQ ID NO:602, b is an integer of 15 to 404, where both a and b | |
| | correspond to the positions of nucleotide residues shown in SEQ ID | |
| | NO:602, and where b is greater than or equal to a +14. | |
| 841024 | Preferably excluded from the present invention are one or more | |
| | polynucleotides comprising a nucleotide sequence described by the | |
| | general formula of a-b, where a is any integer between 1 to 1154 of | |
| | SEQ ID NO:603, b is an integer of 15 to 1168, where both a and b | |
| | correspond to the positions of nucleotide residues shown in SEQ ID | |
| | NO:603, and where b is greater than or equal to a +14. | |
| 841025 | Preferably excluded from the present invention are one or more | AA188466 |
| | polynucleotides comprising a nucleotide sequence described by the | |
| | general formula of a-b, where a is any integer between 1 to 444 of | |
| | SEQ ID NO:604, b is an integer of 15 to 458, where both a and b | |
| | correspond to the positions of nucleotide residues shown in SEQ ID | |
| | NO:604, and where b is greater than or equal to a +14. | |
| 841026 | Preferably excluded from the present invention are one or more | N72911, AA148215, AA166925, AA228038, AA228148, |
| | polynucleotides comprising a nucleotide sequence described by the | AA483775, AA504475, AA740596, AA742681, AA808693, |
| | general formula of a-b, where a is any integer between 1 to 897 of | AA811844, AI054163, D12456, D12055, AA446237, AA599068, |
| | SEQ ID NO:605, b is an integer of 15 to 911, where both a and b | AI075720 |
| | correspond to the positions of nucleotide residues shown in SEQ ID | |
| | NO:605, and where b is greater than or equal to a +14. | |
| 841027 | Preferably excluded from the present invention are one or more | H41598, H62017, H69575, H69596, H84745, H95065, N36218, |
| | polynucleotides comprising a nucleotide sequence described by the | N54430, N80053, W52484, AA010201, AA235462, AA513394, |
| | general formula of a-b, where a is any integer between 1 to 724 of | AA559062, H84833, AA574343, AA835915, AA872643, |
| | SEQ ID NO:606, b is an integer of 15 to 738, where both a and b | AA877236 |
| | correspond to the positions of nucleotide residues shown in SEQ ID | |
| | NO:606, and where b is greater than or equal to a +14. | |
| 841029 | Preferably excluded from the present invention are one or more | T50950, T40351, T41210, T64654, T99782, T99883, R12658, |
| | polynucleotides comprising a nucleotide sequence described by the | R20557, R48599, R48701, R20557, H10512, R82975, R83815, |
| | general formula of a-b, where a is any integer between 1 to 1334 of | H51313, H51908, H54291, H54369, H57072, H57073, H70169, |
| | SEQ ID NO:607, b is an integer of 15 to 1348, where both a and b | H81838, H89935, H91980, N26532, N26640, N35643, N39712, |
| | correspond to the positions of nucleotide residues shown in SEQ ID | N39735, N44132, N45472, N46821, N66762, N68174, N73964, |
| | NO:607, and where b is greater than or equal to a +14. | N80633, N93213, N93218, N94936, W19558, W19581, W20315, |
| | | W33192, W37258, W38673, W38998, W38807, W39086, |
| | | W72523, W96449, W96546, N90712, AA022694, AA022787, |
| | | AA033992, AA033993, AA055233, AA128163, AA125976, |
| | | AA151620, AA228010, AA234230, AA235616, AA460804, |
| | | AA428125, AA428126, AA244254, AA244044, AA282782, |
| | | AA459422, AA465647, AA514260, AA524819, AA526652, |
| | | AA527010, AA557557, AA593780, AA594299, AA604168, |
| | | AA612788, AA622842, AA639066, AA729180, AA730491, |
| | | AA737387, AA814201, AA847016, AA872392, AA873523, |
| | | AA885963, AA902850, AA946931, AA968795, AA974320, |
| | | AA977816, A1094935, AA642338, AA093758, AA094834, |
| | | AA650022, AA248350, AA402422, AA446745, AA449102, |
| | | AA449538, AA482267, AA431490, AA431697, AA432060, |
| | | AA706083, AA706225, AA723554, AA724604, AA732823, |
| | | AA772101, AA772330, AA781604, AA782387, AA843140, |
| | | AA843480, AA843756, AA846144, AA846155, AA845500, |
| | | AA854399, AA855096, AA860829, AA888776, AA889009, |
| | | AI023231, AI028453, AI031906, AI031928, AI038365, AI081907, |
| | | AI050990, AI056013, AI066647, AI073764, AI074709, AI076720, |
| | | AI077283, AI040402, AI087021, AI088075, AI087912, AI092000, |
| | | AI091592, AI092431, AI092579, AI095442, D20747, F05340, |
| | | AA694556 |
| 841030 | Preferably excluded from the present invention are one or more | T85016 |
| | polynucleotides comprising a nucleotide sequence described by the | |
| | general formula of a-b, where a is any integer between 1 to 708 of | |
| | SEQ ID NO:608, b is an integer of 15 to 722, where both a and b | |
| | correspond to the positions of nucleotide residues shown in SEQ ID | |
| | NO:608, and where b is greater than or equal to a +14. | |
| 841031 | Preferably excluded from the present invention are one or more | |
| | polynucleotides comprising a nucleotide sequence described by the | |
| | general formula of a-b, where a is any integer between 1 to 316 of | |
| | SEQ ID NO:609, b is an integer of 15 to 330, where both a and b | |
| | correspond to the positions of nucleotide residues shown in SEQ ID | |
| | NO:609, and where b is greater than or equal to a +14. | |
| 841034 | Preferably excluded from the present invention are one or more | |
| | polynucleotides comprising a nucleotide sequence described by the | |
| | general formula of a-b, where a is any integer between 1 to 1852 of | |
| | SEQ ID NO:610, b is an integer of 15 to 1866, where both a and b | |
| | correspond to the positions of nucleotide residues shown in SEQ ID | |
| | NO:610, and where b is greater than or equal to a +14. | |
| 841036 | Preferably excluded from the present invention are one or more | |
| | polynucleotides comprising a nucleotide sequence described by the | |
| | general formula of a-b, where a is any integer between 1 to 2162 of | |
| | SEQ ID NO:61 1, b is an integer of 15 to 2176, where both a and b | |
| | correspond to the positions of nucleotide residues shown in SEQ ID | |
| | NO:611, and where b is greater than or equal to a +14. | |
| 841039 | Preferably excluded from the present invention are one or more | |
| | polynucleotides comprising a nucleotide sequence described by the | |
| | general formula of a-b, where a is any integer between 1 to 3605 of | |
| | SEQ ID NO:612, b is an integer of 15 to 3619, where both a and b | |
| | correspond to the positions of nucleotide residues shown in SEQ ID | |
| | NO:612, and where b is greater than or equal to a +14. | |
| 841040 | Preferably excluded from the present invention are one or more | |
| | polynucleotides comprising a nucleotide sequence described by the | |
| | general formula of a-b, where a is any integer between 1 to 1413 of | |
| | SEQ ID NO:613, b is an integer of 15 to 1427, where both a and b | |
| | correspond to the positions of nucleotide residues shown in SEQ ID | |
| | NO:613, and where b is greater than or equal to a +14. | |
| 841048 | Preferably excluded from the present invention are one or more | N69349, W37995, W37996, AA099842, AA129834, AA134879, |
| | polynucleotides comprising a nucleotide sequence described by the | AA136131, AA136101, AA213847, AA278288, AA278834, |
| | general formula of a-b, where a is any integer between 1 to 1419 of | AA639630, AA743611, AA745858, AA765478, AA829501, |
| | SEQ ID NO:614, b is an integer of 15 to 1433, where both a and b | AA830648, AA837909, AA877341, AA887480, AA910616, |
| | correspond to the positions of nucleotide residues shown in SEQ ID | C01321, AA134878, AA410913, AA441809, AA441871, |
| | NO:614, and where b is greater than or equal to a +14. | AA447551, AA679476, F13794 |
| 841049 | Preferably excluded from the present invention are one or more | AA206670 |
| | polynucleotides comprising a nucleotide sequence described by the | |
| | general formula of a-b, where a is any integer between 1 to 492 of | |
| | SEQ ID NO:615, b is an integer of 15 to 506, where both a and b | |
| | correspond to the positions of nucleotide residues shown in SEQ ID | |
| | NO:615, and where b is greater than or equal to a +14. | |
| 841050 | Preferably excluded from the present invention are one or more | R13856, R36998, H88745, H88749, H88750, H88744, H88745, |
| | polynucleotides comprising a nucleotide sequence described by the | H88750, N20597, N27562, N28993, N40383, W23671, W42418, |
| | general formula of a-b, where a is any integer between 1 to 2160 of | W42515, AA017276, AA054535, AA054527, AA081056, |
| | SEQ ID NO:616, b is an integer of 15 to 2174, where both a and b | AA083641, AA165258, AA165257, AA195316, AA195497, |
| | correspond to the positions of nucleotide residues shown in SEQ ID | AA504774, AA731655, AA743407, AA827654, AI074376, |
| | NO:616, and where b is greater than or equal to a +14. | AA096064, AA677874, AI049801, T10385, D31353, AA700430 |
| 841052 | Preferably excluded from the present invention are one or more | |
| | polynucleotides comprising a nucleotide sequence described by the | |
| | general formula of a-b, where a is any integer between 1 to 3133 of | |
| | SEQ ID NO:617, b is an integer of 15 to 3147, where both a and b | |
| | correspond to the positions of nucleotide residues shown in SEQ ID | |
| | NO:617, and where b is greater than or equal to a +14. | |
| 841054 | Preferably excluded from the present invention are one or more | |
| | polynucleotides comprising a nucleotide sequence described by the | |
| | general formula of a-b, where a is any integer between 1 to 2515 of | |
| | SEQ ID NO:618, b is an integer of 15 to 2529, where both a and b | |
| | correspond to the positions of nucleotide residues shown in SEQ ID | |
| | NO:618, and where b is greater than or equal to a +14. | |
| 841055 | Preferably excluded from the present invention are one or more | T86070 |
| | polynucleotides comprising a nucleotide sequence described by the | |
| | general formula of a-b, where a is any integer between 1 to 537 of | |
| | SEQ ID NO:619, b is an integer of 15 to 551, where both a and b | |
| | correspond to the positions of nucleotide residues shown in SEQ ID | |
| | NO:619, and where b is greater than or equal to a +14. | |
| 841056 | Preferably excluded from the present invention are one or more | T65020, T166102, T74444, R12529, R36487, R36488, R37425, |
| | polynucleotides comprising a nucleotide sequence described by the | R52082, R52176, N58833, N75250, AA573305, AA687450, |
| | general formula of a-b, where a is any integer between 1 to 1721 of | AA687507, AA810182, AA815088, AA908253, AI084103, |
| | SEQ ID NO:620, b is an integer of 15 to 1735, where both a and b | AA489756, AA844081, AA844438, AA854762, AA897722, |
| | correspond to the positions of nucleotide residues shown in SEQ ID | H11861, F12468, T83267, F09506, F10088 |
| | NO:620, and where b is greater than or equal to a +14. | |
| 841060 | Preferably excluded from the present invention are one or more | |
| | polynucleotides comprising a nucleotide sequence described by the | |
| | general formula of a-b, where a is any integer between 1 to 1012 of | |
| | SEQ ID NO:621, b is an integer of 15 to 1026, where both a and b | |
| | correspond to the positions of nucleotide residues shown in SEQ ID | |
| | NO:621, and where b is greater than or equal to a +14. | |
| 841061 | Preferably excluded from the present invention are one or more | W47450, AA491124 |
| | polynucleotides comprising a nucleotide sequence described by the | |
| | general formula of a-b, where a is any integer between 1 to 656 of | |
| | SEQ ID NO:622, b is an integer of 15 to 670, where both a and b | |
| | correspond to the positions of nucleotide residues shown in SEQ ID | |
| | NO:622, and where b is greater than or equal to a +14. | |
| 841062 | Preferably excluded from the present invention are one or more | |
| | polynucleotides comprising a nucleotide sequence described by the | |
| | general formula of a-b, where a is any integer between 1 to 2149 of | |
| | SEQ ID NO:623, b is an integer of 15 to 2163, where both a and b | |
| | correspond to the positions of nucleotide residues shown in SEQ ID | |
| | NO:623, and where b is greater than or equal to a +14. | |
| 841063 | Preferably excluded from the present invention are one or more | AA227288, AA282718 |
| | polynucleotides comprising a nucleotide sequence described by the | |
| | general formula of a-b, where a is any integer between 1 to 587 of | |
| | SEQ ID NO:624, b is an integer of 15 to 601, where both a and b | |
| | correspond to the positions of nucleotide residues shown in SEQ ID | |
| | NO:624, and where b is greater than or equal to a +14. | |
| 841067 | Preferably excluded from the present invention are one or more | |
| | polynucleotides comprising a nucleotide sequence described by the | |
| | general formula of a-b, where a is any integer between 1 to 579 of | |
| | SEQ ID NO:625, b is an integer of 15 to 593, where both a and b | |
| | correspond to the positions of nucleotide residues shown in SEQ ID | |
| | NO:625, and where b is greater than or equal to a +14. | |
| 841074 | Preferably excluded from the present invention are one or more | T39947, T40903, T90518, T190617, T86882, T86883, R11373, |
| | polynucleotides comprising a nucleotide sequence described by the | T79972, T83358, T83504, R16291, R18540, R18728, R21852, |
| | general formula of a-b, where a is any integer between 1 to 2258 of | R21872, R32969, R33513, R34056, R35153, R37578, R41528, |
| | SEQ ID NO:626, b is an integer of 15 to 2272, where both a and b | R42089, R508112, R41528, R42089, R63072, R63114, R66886, |
| | correspond to the positions of nucleotide residues shown in SEQ ID | R68286, R68328, R77261, R77305, H04160, H04159, H09820, |
| | NO:626, and where b is greater than or equal to a +14. | H09915, H11374, H11399, H11475, H11580, H20564, H20656, |
| | | H20724, H20725, H45913, R87571, H71492, H71493, H77970, |
| | | H77971, H85921, H95617, H97011, H97137, H97973, H99201, |
| | | H99869, N20626, N21042, N23341, N23509, N27621, N27863, |
| | | N28554, N28813, N33434, N35711, N36525, N40636, N42409, |
| | | N50418, N50473, N55217, N55526, N77009, W15345, W31916, |
| | | W39297, W39437, W40562, W40586, W52515, W56373, |
| | | W56584, W56673, W56738, W60072, W73328, AA001060, |
| | | AA001061, AA001355, AA012936, AA013022, AA020854, |
| | | AA021013, AA021245, AA021350, AA041249, AA044791, |
| | | AA057517, AA070118, AA081114, AA081289, AA081518, |
| | | AA081758, AA081654, AA081910, AA081807, AA083386, |
| | | AA083520, AA084143, AA084169, AA084637, AA102204, |
| | | AA101101, AA112305, AA112273, AA113158, AA113205, |
| | | AA113234, AA113290, AA112514, AA114269, AA114292, |
| | | AA121997, AA121998, AA122357, AA122358, AA127073, |
| | | AA125796, AA134357, AA134635, AA148203, AA148204, |
| | | AA148658, AA148659, AA156277, AA156388, AA158662, |
| | | AA159027, AA160336, AA159855, AA160818, AA176261, |
| | | AA176262, AA181259, AA182937, AA187516, AA186906, |
| | | AA186943, AA210754, AA211829, AA223289, AA223297, |
| | | AA223271, AA223898, AA223866, AA223865, AA223930, |
| | | AA224002, AA226834, AA227007, AA251494, AA464562, |
| | | AA464663, AA282038, AA282381, AA282799, AA282890, |
| | | AA454945, AA455324, AA459366, AA459591, AA471068, |
| | | AA493188, AA506956, AA515184, AA525415, AA528016, |
| | | AA531574, AA557548, AA559080, AA558794, AA601508, |
| | | AA602820, AA604093, AA580330, AA665041, AA688154, |
| | | AA714131, AA721076, AA729400, AA730738, AA736940, |
| | | AA745800, AA746251, AA747771, AA749097, AA761791, |
| | | AA765245, AA769486, AA810468, AA809803, AA815070, |
| | | AA815124, AA825529, AA827628, AA827818, AA830566, |
| | | AA831651, AA832026, AA836109, AA856618, AA858034, |
| | | AA862500, AA908700, AA916911, AA923104, AA911251, |
| | | AA922814, AA948643, AA975963, AA976127, AA988496, |
| | | AA995369, A1015981, D82125, N85599, N85825, W60998, |
| | | N87121, N88156, C05715, C05853, AA046846, AA641779, |
| | | AA070117, C20828, C21327, AA159483, AA206049, AA206104, |
| | | AA206105, AA206439, AA206436, AA206529, AA206577, |
| | | AA206641, AA205227, AA205214, AA205483, AA205488, |
| | | AA205554, AA205495, AA205683, AA205707, AA205655, |
| | | AA648896, AA649019, AA211090, AA211201, AA219240, |
| | | AA219379, AA248392, AA263057, AA436015, AA436120, |
| | | AA444131, AA449168, AA485456, AA488660, C74998, C75053, |
| | | C75178, C75578, C75650, AA598408, AA600229, AA633997, |
| | | AA664255, AA670477, AA456958, AA457067, AA457333, |
| | | AA707431, AA708046, AA708052, AA722286, AA679711, |
| | | AA774733, AA776895, AA778320, AA782343, AA852970, |
| | | AA852969, AA853367, AA854017, AA884081, AA913264, |
| | | AI003524, AI003161, AI061383, AI079587, AI080214, AI085729, |
| | | AI088540, AI088599, T10660, T11369, T16057, T17106, Z41696, |
| | | T16213, T27465, F01519, F02134, T54069, F07296, F13614, |
| | | F13652, AA702026 |
| 841076 | Preferably excluded from the present invention are one or more | |
| | polynucleotides comprising a nucleotide sequence described by the | |
| | general formula of a-b, where a is any integer between 1 to 857 of | |
| | SEQ ID NO:627, b is an integer of 15 to 871, where both a and b | |
| | correspond to the positions of nucleotide residues shown in SEQ ID | |
| | NO:627, and where b is greater than or equal to a +14. | |
| 841081 | Preferably excluded from the present invention are one or more | H80595, N66964, W60868, W60944, AA554024, AA581858, |
| | polynucleotides comprising a nucleotide sequence described by the | AA603775, AA569390, AA721420, AA730838, AA746990, |
| | general formula of a-b, where a is any integer between 1 to 765 of | AA764955, AA824533, AA886662, AA902151, AA922977, |
| | SEQ ID NO:628, b is an integer of 15 to 779, where both a and b | AA931633, AI004155, C17761, AA643235, AA249456, |
| | correspond to the positions of nucleotide residues shown in SEQ ID | AA401851, AA447213, AA769929, AA861067, AA868853, |
| | NO:628, and where b is greater than or equal to a +14. | AI001993, AI038228, AI080577, D12310, AA699302, AA700733 |
| 841083 | Preferably excluded from the present invention are one or more | |
| | polynucleotides comprising a nucleotide sequence described by the | |
| | general formula of a-b, where a is any integer between 1 to 1821 of | |
| | SEQ ID NO:629, b is an integer of 15 to 1835, where both a and b | |
| | correspond to the positions of nucleotide residues shown in SEQ ID | |
| | NO:629, and where b is greater than or equal to a +14. | |
| 841089 | Preferably excluded from the present invention are one or more | T97583, H27459, H28283, H30123, H30163, H40493, H64399, |
| | polynucleotides comprising a nucleotide sequence described by the | H99038, N20188, N29090, W24593, W47194, W47309, W51990, |
| | general formula of a-b, where a is any integer between 1 to 1083 of | W52638, W56428, W56312, W73795, W78984, W80386, |
| | SEQ ID NO:630, b is an integer of 15 to 1097, where both a and b | W85832, W87763, W87679, W93594, W93490, AA010192, |
| | correspond to the positions of nucleotide residues shown in SEQ ID | AA010091, AA229878, AA230283, AA508851, AA553908, |
| | NO:630, and where b is greater than or equal to a +14. | H64447, AA582764, |
| | | AA805299, AA877051, A1053512, |
| | | AI053734, AI054001, AI054092, AI054119, AI054274, AI054309, |
| | | AA758790, AA972288, AI028150, AI077801, AI092052, D20235, |
| | | T97631 |
| 841093 | Preferably excluded from the present invention are one or more | |
| | polynucleotides comprising a nucleotide sequence described by the | |
| | general formula of a-b, where a is any integer between 1 to 1523 of | |
| | SEQ ID NO:631, b is an integer of 15 to 1537, where both a and b | |
| | correspond to the positions of nucleotide residues shown in SEQ ID | |
| | NO:631, and where b is greater than or equal to a +14. | |
| 841097 | Preferably excluded from the present invention are one or more | |
| | polynucleotides comprising a nucleotide sequence described by the | |
| | general formula of a-b, where a is any integer between 1 to 1887 of | |
| | SEQ ID NO:632, b is an integer of 15 to 1901, where both a and b | |
| | correspond to the positions of nucleotide residues shown in SEQ ID | |
| | NO:632, and where b is greater than or equal to a +14. | |
| 841098 | Preferably excluded from the present invention are one or more | T39572, R32405, R78435, R82780, H01823, W23901, AA705025 |
| | polynucleotides comprising a nucleotide sequence described by the | |
| | general formula of a-b, where a is any integer between 1 to 1736 of | |
| | SEQ ID NO:633, b is an integer of 15 to 1750, where both a and b | |
| | correspond to the positions of nucleotide residues shown in SEQ ID | |
| | NO:633, and where b is greater than or equal to a +14. | |
| 841101 | Preferably excluded from the present invention are one or more | H1755, R12465, R23435, R54254, H10274, N31847, W63594, |
| | polynucleotides comprising a nucleotide sequence described by the | AA488942, AA581018, AA767423, N56490, W26165, N87429, |
| | general formula of a-b, where a is any integer between 1 to 1912 of | AA093862, Z41898 |
| | SEQ ID NO:634, b is an integer of 15 to 1926, where both a and b | |
| | correspond to the positions of nucleotide residues shown in SEQ ID | |
| | NO:634, and where b is greater than or equal to a +14. | |
| 841113 | Preferably excluded from the present invention are one or more | |
| | polynucleotides comprising a nucleotide sequence described by the | |
| | general formula of a-b, where a is any integer between 1 to 1332 of | |
| | SEQ ID NO:635, b is an integer of 15 to 1346, where both a and b | |
| | correspond to the positions of nucleotide residues shown in SEQ ID | |
| | NO:635, and where b is greater than or equal to a +14. | |
| 841115 | Preferably excluded from the present invention are one or more | |
| | polynucleotides comprising a nucleotide sequence described by the | |
| | general formula of a-b, where a is any integer between 1 to 1570 of | |
| | SEQ ID NO:636, b is an integer of 15 to 1584, where both a and b | |
| | correspond to the positions of nucleotide residues shown in SEQ ID | |
| | NO:636, and where b is greater than or equal to a +14. | |
| 841116 | Preferably excluded from the present invention are one or more | |
| | polynucleotides comprising a nucleotide sequence described by the | |
| | general formula of a-b, where a is any integer between 1 to 1649 of | |
| | SEQ ID NO:637, b is an integer of 15 to 1663, where both a and b | |
| | correspond to the positions of nucleotide residues shown in SEQ ID | |
| | NO:637, and where b is greater than or equal to a +14. | |
| 841117 | Preferably excluded from the present invention are one or more | |
| | polynucleotides comprising a nucleotide sequence described by the | |
| | general formula of a-b, where a is any integer between 1 to 3933 of | |
| | SEQ ID NO:638, b is an integer of 15 to 3947, where both a and b | |
| | correspond to the positions of nucleotide residues shown in SEQ ID | |
| | NO:638, and where b is greater than or equal to a +14. | |
| 841125 | Preferably excluded from the present invention are one or more | R40268, R40268, R60037, H05829, H71311, H71355, H94227, |
| | polynucleotides comprising a nucleotide sequence described by the | N30711, N56686, W70033, W80987, W94564, W92648, |
| | general formula of a-b, where a is any integer between 1 to 1413 of | AA036715, AA043642, AA045098, AA045127, AA057355, |
| | SEQ ID NO:639, b is an integer of 15 to 1427, where both a and b | AA070703, AA150080, AA186980, AA196549, AA513466, |
| | correspond to the positions of nucleotide residues shown in SEQ ID | AA564458, H92998, AA584288, AA587915, AA746344, |
| | NO:639, and where b is greater than or equal to a +14. | AA749431, AA836837, AA946608, AA977318, AI000432, |
| | | AI000474, AA150018, AA487107, AA777153, AA778651, |
| | | AA778720, AA824341, AI038357, AI038499, AI076148, |
| | | A1077415, A1040155, A1090830, T16464, AA682387 |
| 841127 | Preferably excluded from the present invention are one or more | N56381 |
| | polynucleotides comprising a nucleotide sequence described by the | |
| | general formula of a-b, where a is any integer between 1 to 906 of | |
| | SEQ ID NO:640, b is an integer of 15 to 920, where both a and b | |
| | correspond to the positions of nucleotide residues shown in SEQ ID | |
| | NO:640, and where b is greater than or equal to a +14. | |
| 841128 | Preferably excluded from the present invention are one or more | |
| | polynucleotides comprising a nucleotide sequence described by the | |
| | general formula of a-b, where a is any integer between 1 to 1692 of | |
| | SEQ ID NO:641, b is an integer of 15 to 1706, where both a and b | |
| | correspond to the positions of nucleotide residues shown in SEQ ID | |
| | NO:641, and where b is greater than or equal to a +14. | |
| 841132 | Preferably excluded from the present invention are one or more | |
| | polynucleotides comprising a nucleotide sequence described by the | |
| | general formula of a-b, where a is any integer between 1 to 2156 of | |
| | SEQ ID NO:642, b is an integer of 15 to 2170, where both a and b | |
| | correspond to the positions of nucleotide residues shown in SEQ ID | |
| | NO:642, and where b is greater than or equal to a +14. | |
| 841133 | Preferably excluded from the present invention are one or more | |
| | polynucleotides comprising a nucleotide sequence described by the | |
| | general formula of a-b, where a is any integer between 1 to 1698 of | |
| | SEQ ID NO:643, b is an integer of 15 to 1712, where both a and b | |
| | correspond to the positions of nucleotide residues shown in SEQ ID | |
| | NO:643, and where b is greater than or equal to a +14. | |
| 841134 | Preferably excluded from the present invention are one or more | T74160, R06227, R06228, R20261, N39674, AA010503, |
| | polynucleotides comprising a nucleotide sequence described by the | AA010502, AA258312, AA258463, AA261908, AA737428, |
| | general formula of a-b, where a is any integer between 1 to 1779 of | AA775864, F12625 |
| | SEQ ID NO:644, b is an integer of 15 to 1793, where both a and b | |
| | correspond to the positions of nucleotide residues shown in SEQ ID | |
| | NO:644, and where b is greater than or equal to a +14. | |
| 841135 | Preferably excluded from the present invention are one or more | T87474, T81011, T98855, T99451, R12662, R20561, R35774, |
| | polynucleotides comprising a nucleotide sequence described by the | R20561, H21581, H30226, H30799, H38312, R87419, R87929, |
| | general formula of a-b, where a is any integer between 1 to 2665 of | H60442, H60488, H82962, H83193, N66578, N98838, W02116, |
| | SEQ ID NO:645, b is an integer of 15 to 2679, where both a and b | W32577, W74585, W94377, AA228054, AA228143, AA242795, |
| | correspond to the positions of nucleotide residues shown in SEQ ID | AA252182, AA482136, AA491273, AA503197, AA603089, |
| | NO:645, and where b is greater than or equal to a +14. | AA740514, AA847687, AA872051, AA904292, AA908878, |
| | | AA937801, AA937818, AA937819, AA989229, AI081549, |
| | | W27606, W28260, C01173, AA090299, AA292408, AA394244, |
| | | AA430326, AA443626, AA678857, AA779761, AA838766, |
| | | AA860401, AA890101, AA772701, AA905819, AA913578, |
| | | AA913854, AA916557, AI073446, AI040348, AI086394, F04810, |
| 841136 | Preferably excluded from the present invention are one or more | T75313, R38678, H08805, H08881, H29671, W45345, AA460481, |
| | polynucleotides comprising a nucleotide sequence described by the | AA461049, AA514387, AA928902, C06109, C15637, AI033621, |
| | general formula of a-b, where a is any integer between 1 to 818 of | N13191, F10796 |
| | SEQ ID NO:646, b is an integer of 15 to 832, where both a and b | |
| | correspond to the positions of nucleotide residues shown in SEQ ID | |
| | NO:646, and where b is greater than or equal to a +14. | |
| 841138 | Preferably excluded from the present invention are one or more | T74162, R08056, R37869, R51362, H95451, N47377, N50420, |
| | polynucleotides comprising a nucleotide sequence described by the | N51509, N56992, N63081, W02768, W74061, W78768, W81120, |
| | general formula of a-b, where ais any integer between 1 to 1311 of | AA004354, AA004355, AA010410, AA011238, AA194618, |
| | SEQ ID NO:647, b is an integer of 15 to 1325, where both a and b | AA461179, AA492472, AA602060, AA742194, AA886331, |
| | correspond to the positions of nucleotide residues shown in SEQ ID | AA904165, AA947316, AA969817, C02127, AA642584, |
| | NO:647, and where b is greater than or equal to a +14. | AA393447, AA398743, AA449962, AA706890, AA757113, |
| | | AA777532, AA812606, AA971808, AA947589, A1033060, |
| | | AI077473, F12626, F10242 |
| 841139 | Preferably excluded from the present invention are one or more | |
| | polynucleotides comprising a nucleotide sequence described by the | |
| | general formula of a-b, where a is any integer between 1 to 592 of | |
| | SEQ ID NO:648, b is an integer of 15 to 606, where both a and b | |
| | correspond to the positions of nucleotide residues shown in SEQ ID | |
| | NO:648, and where b is greater than or equal to a +14. | |
| 841141 | Preferably excluded from the present invention are one or more | T70178, T78370, H06915, H19407, H20353, H59580, H68320, |
| | polynucleotides comprising a nucleotide sequence described by the | AA282429, AA504514, AA504598, AA564110, AA622709, |
| | general formula of a-b, where a is any integer between 1 to 1682 of | AA635277, AA814782, AA094950, AA890363, AI082674, |
| | SEQ ID NO:649, b is an integer of 15 to 1696, where both a and b | T69852 |
| | correspond to the positions of nucleotide residues shown in SEQ ID | |
| | NO:649, and where b is greater than or equal to a +14. | |
| 841142 | Preferably excluded from the present invention are one or more | R16159, R55052, R59723, R59832, R72647, R72726, H60244, |
| | polynucleotides comprising a nucleotide sequence described by the | N33957, N49667, N73245, N79519, N79654, W16510, W16960, |
| | general formula of a-b, where a is any integer between 1 to 3045 of | AA032239, AA033647, AA463305, AA280166, AA729292, |
| | SEQ ID NO:650, b is an integer of 15 to 3059, where both a and b | AA954720, AA988492, AI015581, C02527, AA393868, |
| | correspond to the positions of nucleotide residues shown in SEQ ID | AA478565, AA478698, AA773346, AI032816, AI078056, |
| | NO:650, and where b is greater than or equal to a +14. | Z38500, Z42263, R15417, AA701338 |
| 841145 | Preferably excluded from the present invention are one or more | T50010, R23613, R26166, R31656, R32370, H43626, H44680, |
| | polynucleotides comprising a nucleotide sequence described by the | R97791, R97841, H96639, N36375, AA192798, AA236435, |
| | general formula of a-b, where a is any integer between 1 to 1352 of | AA262943, AA491551, AA491856, AA506260, AA533612, |
| | SEQ ID NO:651, b is an integer of 15 to 1366, where both a and b | AA563684, AA639509, AA193170, AA453170, AA478555, |
| | correspond to the positions of nucleotide residues shown in SEQ ID | AA478689, AA628811, AA971928 |
| | NO:651, and where b is greater than or equal to a +14. | |
| 841146 | Preferably excluded from the present invention are one or more | T49969, T55739, T55781, R44196, R44196, R56223, R65770, |
| | polynucleotides comprising a nucleotide sequence described by the | R65861, H07914, H29735, H47548, N23748, N33136, N36915, |
| | general formula of a-b, where a is any integer between 1 to 1411 of | N42188, N58782, AA044179, AA044364, AA056411, AA056659, |
| | SEQ ID NO:652, b is an integer of 15 to 1425, where both a and b | AA088892, AA129553, AA136567, AA182691, AA460927, |
| | correspond to the positions of nucleotide residues shown in SEQ ID | AA461231, AA423834, AA423872, AA429008, AA284199, |
| | NO:652, and where b is greater than or equal to a +14. | AA502390, AA503746, AA524414, AA573485, AA731750, |
| | | AA748643, N42149, C03886, C04870, AA401440, AA443282, |
| | | AA453535, AA680012, AA885303, AA773518, AA905979, |
| | | AA917504, AA993697, A1014527, A1038343, AI039552, |
| | | AI075983, AI040477, T15474, Z40499 |
| 841150 | Preferably excluded from the present invention are one or more | |
| | polynucleotides comprising a nucleotide sequence described by the | |
| | general formula of a-b, where a is any integer between 1 to 600 of | |
| | SEQ ID NO:653, b is an integer of 15 to 614, where both a and b | |
| | correspond to the positions of nucleotide residues shown in SEQ ID | |
| | NO:653, and where b is greater than or equal to a +14. | |
| 841153 | Preferably excluded from the present invention are one or more | |
| | polynucleotides comprising a nucleotide sequence described by the | |
| | general formula of a-b, where a is any integer between 1 to 2798 of | |
| | SEQ ID NO:654, b is an integer of 15 to 2812, where both a and b | |
| | correspond to the positions of nucleotide residues shown in SEQ ID | |
| | NO:654, and where b is greater than or equal to a +14. | |
| 841154 | Preferably excluded from the present invention are one or more | |
| | polynucleotides comprising a nucleotide sequence described by the | |
| | general formula of a-b, where a is any integer between 1 to 1983 of | |
| | SEQ ID NO:655, b is an integer of 15 to 1997, where both a and b | |
| | correspond to the positions of nucleotide residues shown in SEQ ID | |
| | NO:655, and where b is greater than or equal to a +14. | |
| 841156 | Preferably excluded from the present invention are one or more | |
| | polynucleotides comprising a nucleotide sequence described by the | |
| | general formula of a-b, where a is any integer between 1 to 1583 of | |
| | SEQ ID NO:656, b is an integer of 15 to 1597, where both a and b | |
| | correspond to the positions of nucleotide residues shown in SEQ ID | |
| | NO:656, and where b is greater than or equal to a +14. | |
| 841157 | Preferably excluded from the present invention are one or more | |
| | polynucleotides comprising a nucleotide sequence described by the | |
| | general formula of a-b, where a is any integer between 1 to 358 of | |
| | SEQ ID NO:657, b is an integer of 15 to 372, where both a and b | |
| | correspond to the positions of nucleotide residues shown in SEQ ID | |
| | NO:657, and where b is greater than or equal to a +14. | |
| 841159 | Preferably excluded from the present invention are one or more | T68013, T68157, R10329, R21935, R22192, R22205, R22243, |
| | polynucleotides comprising a nucleotide sequence described by the | R22259, R22584, R36709, R37550, R37969, R56215, H12513, |
| | general formula of a-b, where a is any integer between 1 to 1212 of | H16028, H42778, H42777, H43237, H49572, H54638, H62014, |
| | SEQ ID NO:658, b is an integer of 15 to 1226, where both a and b | H62015, H87009, H96461, H99230, N20416, N21538, N26351, |
| | correspond to the positions of nucleotide residues shown in SEQ ID | N26416, N31763, N32343, N57436, N68981, N76396, N94358, |
| | NO:658, and where b is greater than or equal to a +14. | W47130, W47170, W47092, W47303, W56010, W56319, |
| | | W57999, W58082, W72901, W80918, W80919, W96026, |
| | | W96247, AA009932, AA027098, AA035781, AA055834, |
| | | AA056358, AA135747, AA135791, AA243433, AA513298, |
| | | AA526888, AA553702, AA564515, AA569564, AA578962, |
| | | AA659038, AA664637, AA664725, AA687093, AA863102, |
| | | AA865570, AA937259, AA948115, F18278, F19594, N56026, |
| | | AA642679, AA205043, AA284794, AA284555, AA402214, |
| | | AA402779, AA421675, AA421674, AA442253, AA477073, |
| | | AA670491, F22786, AA703506, AA732970, AA854540, |
| | | AA993128, AI023954, AI039979, AI041931, AI094341, T24697, |
| 841164 | Preferably excluded from the present invention are one or more | |
| | polynucleotides comprising a nucleotide sequence described by the | |
| | general formula of a-b, where a is any integer between 1 to 450 of | |
| | SEQ ID NO:659, b is an integer of 15 to 464, where both a and b | |
| | correspond to the positions of nucleotide residues shown in SEQ ID | |
| | NO:659, and where b is greater than or equal to a +14. | |
| 841167 | Preferably excluded from the present invention are one or more | |
| | polynucleotides comprising a nucleotide sequence described by the | |
| | general formula of a-b, where a is any integer between 1 to 2535 of | |
| | SEQ ID NO:660, b is an integer of 15 to 2549, where both a and b | |
| | correspond to the positions of nucleotide residues shown in SEQ ID | |
| | NO:660, and where b is greater than or equal to a +14. | |
| 841170 | Preferably excluded from the present invention are one or more | R1156, R05766, R36365, H10217, H10272, R85306, R85305, |
| | polynucleotides comprising a nucleotide sequence described by the | R92966, R94593, R94594, H87399, N30640, N62299, N67420, |
| | general formula of a-b, where a is any integer between 1 to 1148 of | N75554, N95145, W69646, W69647, W87822, W87911, |
| | SEQ ID NO:661, b is an integer of 15 to 1162, where both a and b | AA025260, AA025338, AA054320, AA054420, AA070779, |
| | correspond to the positions of nucleotide residues shown in SEQ ID | AA132029, AA132151, AA147254, AA156241, AA173636, |
| | NO:661, and where b is greater than or equal to a +14. | AA458647, AA458883, AA459073, AA282256, AA490721, |
| | | AA491213, AA581846, AA581975, AA592924, AA617652, |
| | | AA715103, AA827927, AA878469, AA922921, AA931906, |
| | | AI024987, AI031704, R29605, AA641542, AA210625, |
| | | AA447827, AA679290, AA845918, AA992688, AI005398, |
| | | AI093117 |
| 841173 | Preferably excluded from the present invention are one or more | T55223, T80732, R48806, R48918, H04949, H04950, H39561, |
| | polynucleotides comprising a nucleotide sequence described by the | AA039409, AA100837, AA128896, AA143629, AA191274, |
| | general formula of a-b, where a is any integer between 1 to 1164 of | AA191696, AA223135, AA223325, AA421101, AA426158, |
| | SEQ ID NO:662, b is an integer of 15 to 1178, where both a and b | AA910569, AA399132, AA399614, AA481845, F01004 |
| | correspond to the positions of nucleotide residues shown in SEQ ID | |
| | NO:662, and where b is greater than or equal to a +14. | |
| 841176 | Preferably excluded from the present invention are one or more | T57362, T57445, N98867, W04663, W58769, AA148433, |
| | polynucleotides comprising a nucleotide sequence described by the | AA156103, AA157650, AA157759, AA192185, AA194358, |
| | general formula of a-b, where a is any integer between 1 to 726 of | AA491525, AA492088, AA515848, AA526390, AA639064, |
| | SEQ ID NO:663, b is an integer of 15 to 740, where both a and b | AA575866, AA579682, AA728989, AA737291, AA740468, |
| | correspond to the positions of nucleotide residues shown in SEQ ID | AA741404, AA827641, AA862841, AA932208, AA974467, |
| | NO:663, and where b is greater than or equal to a +14. | AA995725, F19218, F19304, N55638, N56464, N89217, |
| | | AA247353, AA401334, F20491, F20992, F21312, AA608827, |
| | | F22463, F22587, AA705812, AA889507 |
| 841178 | Preferably excluded from the present invention are one or more | |
| | polynucleotides comprising a nucleotide sequence described by the | |
| | general formula of a-b, where a is any integer between 1 to 1656 of | |
| | SEQ ID NO:664, b is an integer of 15 to 1670, where both a and b | |
| | correspond to the positions of nucleotide residues shown in SEQ ID | |
| | NO:664, and where b is greater than or equal to a +14. | |
| 841180 | Preferably excluded from the present invention are one or more | |
| | polynucleotides comprising a nucleotide sequence described by the | |
| | general formula of a-b, where a is any integer between 1 to 3350 of | |
| | SEQ ID NO:665, b is an integer of 15 to 3364, where both a and b | |
| | correspond to the positions of nucleotide residues shown in SEQ ID | |
| | NO:665, and where b is greater than or equal to a +14. | |
| 841181 | Preferably excluded from the present invention are one or more | |
| | polynucleotides comprising a nucleotide sequence described by the | |
| | general formula of a-b, where a is any integer between 1 to 1209 of | |
| | SEQ ID NO:666, b is an integer of 15 to 1223, where both a and b | |
| | correspond to the positions of nucleotide residues shown in SEQ ID | |
| | NO:666, and where b is greater than or equal to a +14. | |
| 841182 | Preferably excluded from the present invention are one or more | |
| | polynucleotides comprising a nucleotide sequence described by the | |
| | general formula of a-b, where a is any integer between 1 to 1983 of | |
| | SEQ ID NO:667, b is an integer of 15 to 1997, where both a and b | |
| | correspond to the positions of nucleotide residues shown in SEQ ID | |
| | NO:667, and where b is greater than or equal to a +14. | |
| 841185 | Preferably excluded from the present invention are one or more | R52220, R70423, N35269, N40823, W42954, AA281810, |
| | polynucleotides comprising a nucleotide sequence described by the | AA524713, AA093155 |
| | general formula of a-b, where a is any integer between 1 to 572 of | |
| | SEQ ID NO:668, b is an integer of 15 to 586, where both a and b | |
| | correspond to the positions of nucleotide residues shown in SEQ ID | |
| | NO:668, and where b is greater than or equal to a +14. | |
| 841187 | Preferably excluded from the present invention are one or more | R3459, R37369, AA814459, AA977199, AA989190, AI004908, |
| | polynucleotides comprising a nucleotide sequence described by the | F9612, C15655, AA203403, AA486444, AA489297, AA677279, |
| | general formula of a-b, where a is any integer between 1 to 1083 of | AA775589, AA909931, AI032801, AI034230, AI040649, |
| | SEQ ID NO:669, b is an integer of 15 to 1097, where both a and b | AI091697 |
| | correspond to the positions of nucleotide residues shown in SEQ ID | |
| | NO:669, and where b is greater than or equal to a +14. | |
| 841188 | Preferably excluded from the present invention are one or more | |
| | polynucleotides comprising a nucleotide sequence described by the | |
| | general formula of a-b, where a is any integer between 1 to 2886 of | |
| | SEQ ID NO:670, b is an integer of 15 to 2900, where both a and b | |
| | correspond to the positions of nucleotide residues shown in SEQ ID | |
| | NO:670, and where b is greater than or equal to a +14. | |
| 841189 | Preferably excluded from the present invention are one or more | AA001736, AA132627, AA568390, F19019, W26201, W69639, |
| | polynucleotides comprising a nucleotide sequence described by the | W69638 |
| | general formula of a-b, where a is any integer between 1 to 973 of | |
| | SEQ ID NO:671, b is an integer of 15 to 987, where both a and b | |
| | correspond to the positions of nucleotide residues shown in SEQ ID | |
| | NO:671, and where b is greater than or equal to a +14. | |
| 841192 | Preferably excluded from the present invention are one or more | T71550, T83900, R08468, T83730, T96865, T96866, R25503, |
| | polynucleotides comprising a nucleotide sequence described by the | R33010, R33895, R35402, R49701, R49701, H26757, H26856, |
| | general formula of a-b, where a is any integer between 1 to 2811 of | H26871, H64273, H64272, H79029, N38824, N45452, N59621, |
| | SEQ ID NO:672, b is an integer of 15 to 2825, where both a and b | N78174, W32994, AA022663, AA022744, AA033910, AA034030, |
| | correspond to the positions of nucleotide residues shown in SEQ ID | AA210790, AA215315, AA228688, AA489044, AA552631, |
| | NO:672, and where b is greater than or equal to a +14. | AA761038, AA761245, AA765845, AA805289, AA862618, |
| | | AA918378, AA991204, C20951, AA476743, AA476746, |
| | | AA663218, AA663792, AA706854, AI022429, AI028102, |
| | | AI038738, AI081573, AI081788, AI082582, AI084275, D25731, |
| | | F04009, F06746, F07761, AA701500, AA702733 |
| 841194 | Preferably excluded from the present invention are one or more | T74233, T88950, T89868, R11972, T84649, R18375, R27737, |
| | polynucleotides comprising a nucleotide sequence described by the | R27738, R37065, R42578, R42578, R61382, R61424, R69423, |
| | general formula of a-b, where a is any integer between 1 to 1416 of | R69553, R77025, H00275, H00276, H08524, H08525, R97851, |
| | SEQ ID NO:673, b is an integer of 15 to 1430, where both a and b | H181046, H181141, AA429044, AA429638, AA504809, AA505159, |
| | correspond to the positions of nucleotide residues shown in SEQ ID | AA552544, AA582297, AA613016, AA627349, AA639590, |
| | NO:673, and where b is greater than or equal to a +14. | AA573385, AA576599, AA657983, AA804493, AA866130, |
| | | AA866200, AA908911, AA908916, AA922964, A1088797, |
| | | AA648981, AA649000, AA442874, AA456809, AA479714, |
| | | AA479836, AA485736, AA486457, AA448038, AA431346, |
| | | AA434235, AA434321, AA683236, AA779612, AA885013, |
| | | AA948075, AI004354, AI039367, AI090972, AA953777, T19678, |
| | | F12570, F10186 |
| 841195 | Preferably excluded from the present invention are one or more | |
| | polynucleotides comprising a nucleotide sequence described by the | |
| | general formula of a-b, where a is any integer between 1 to 1111 of | |
| | SEQ ID NO:674, b is an integer of 15 to 1125, where both a and b | |
| | correspond to the positions of nucleotide residues shown in SEQ ID | |
| | NO:674, and where b is greater than or equal to a +14. | |
| 841198 | Preferably excluded from the present invention are one or more | |
| | polynucleotides comprising a nucleotide sequence described by the | |
| | general formula of a-b, where a is any integer between 1 to 1063 of | |
| | SEQ ID NO:675, b is an integer of 15 to 1077, where both a and b | |
| | correspond to the positions of nucleotide residues shown in SEQ ID | |
| | NO:675, and where b is greater than or equal to a +14. | |
| 841200 | Preferably excluded from the present invention are one or more | R55754, R55738, H22912, H24090, H29740, AA232258, |
| | polynucleotides comprising a nucleotide sequence described by the | AA442918, Z42805, F13301 |
| | general formula of a-b, where a is any integer between 1 to 906 of | |
| | SEQ ID NO:676, b is an integer of 15 to 920, where both a and b | |
| | correspond to the positions of nucleotide residues shown in SEQ ID | |
| | NO:676, and where b is greater than or equal to a +14. | |
| 841201 | Preferably excluded from the present invention are one or more | AA932596, D80656, D81201, D81580, C15574, AI025303, |
| | polynucleotides comprising a nucleotide sequence described by the | AA701535 |
| | general formula of a-b, where a is any integer between 1 to 1233 of | |
| | SEQ ID NO:677, b is an integer of 15 to 1247, where both a and b | |
| | correspond to the positions of nucleotide residues shown in SEQ ID | |
| | NO:677, and where b is greater than or equal to a +14. | |
| 841202 | Preferably excluded from the present invention are one or more | |
| | polynucleotides comprising a nucleotide sequence described by the | |
| | general formula of a-b, where a is any integer between 1 to 2653 of | |
| | SEQ ID NO:678, b is an integer of 15 to 2667, where both a and b | |
| | correspond to the positions of nucleotide residues shown in SEQ ID | |
| | NO:678, and where b is greater than or equal to a +14. | |
| 841209 | Preferably excluded from the present invention are one or more | |
| | polynucleotides comprising a nucleotide sequence described by the | |
| | general formula of a-b, where a is any integer between 1 to 938 of | |
| | SEQ ID NO:679, b is an integer of 15 to 952, where both a and b | |
| | correspond to the positions of nucleotide residues shown in SEQ ID | |
| | NO:679, and where b is greater than or equal to a +14. | |
| 841210 | Preferably excluded from the present invention are one or more | |
| | polynucleotides comprising a nucleotide sequence described by the | |
| | general formula of a-b, where a is any integer between 1 to 2295 of | |
| | SEQ ID NO:680, b is an integer of 15 to 2309, where both a and b | |
| | correspond to the positions of nucleotide residues shown in SEQ ID | |
| | NO:680, and where b is greater than or equal to a +14. | |
| 841213 | Preferably excluded from the present invention are one or more | AA133947 |
| | polynucleotides comprising a nucleotide sequence described by the | |
| | general formula of a-b, where a is any integer between 1 to 437 of | |
| | SEQ ID NO:681, b is an integer of 15 to 451, where both a and b | |
| | correspond to the positions of nucleotide residues shown in SEQ ID | |
| | NO:681, and where b is greater than or equal to a +14. | |
| 841217 | Preferably excluded from the present invention are one or more | C17425 |
| | polynucleotides comprising a nucleotide sequence described by the | |
| | general formula of a-b, where a is any integer between 1 to 1284 of | |
| | SEQ ID NO:682, b is an integer of 15 to 1298, where both a and b | |
| | correspond to the positions of nucleotide residues shown in SEQ ID | |
| | NO:682, and where b is greater than or equal to a +14. | |
| 841219 | Preferably excluded from the present invention are one or more | |
| | polynucleotides comprising a nucleotide sequence described by the | |
| | general formula of a-b, where a is any integer between 1 to 845 of | |
| | SEQ ID NO:683, b is an integer of 15 to 859, where both a and b | |
| | correspond to the positions of nucleotide residues shown in SEQ ID | |
| | NO:683, and where b is greater than or equal to a +14. | |
| 841222 | Preferably excluded from the present invention are one or more | |
| | polynucleotides comprising a nucleotide sequence described by the | |
| | general formula of a-b, where a is any integer between 1 to 1237 of | |
| | SEQ ID NO:684, b is an integer of 15 to 1251, where both a and b | |
| | correspond to the positions of nucleotide residues shown in SEQ ID | |
| | NO:684, and where b is greater than or equal to a +14. | |
| 841223 | Preferably excluded from the present invention are one or more | T48001, T48881, T48882, T73986, T81100, T81151, T82458, |
| | polynucleotides comprising a nucleotide sequence described by the | T14770, R31779, R42540, R42540, R59226, R59286, R74588, |
| | general formula of a-b, where a is any integer between 1 to 2586 of | R78473, R78539, H11611, H11700, H24632, H30034, H42336, |
| | SEQ ID NO:685, b is an integer of 15 to 2600, where both a and b | R99669, N27968, N40733, N93719, W21125, W73346, W94235, |
| | correspond to the positions of nucleotide residues shown in SEQ ID | W94237, AA026530, AA039301, AA039302, AA039611, |
| | NO:685, and where b is greater than or equal to a +14. | AA234259, AA460377, AA460815, AA428913, AA429928, |
| | | AA468129, AA468177, AA490801, AA602786, AA622704, |
| | | AA911637, AA972558, AA973705, AA987526, AI008182, |
| | | AI032242, W21787, W27428, AA654230, AA443814, AA447184, |
| | | AA453411, AA453917, AA479442, AA489468, AA885138, |
| | | AA904627, AA972149, AI014507, AI079892, Z39201, Z43111, |
| | | D45594, D45647, F13465, F10053, AA700349 |
| 841224 | Preferably excluded from the present invention are one or more | |
| | polynucleotides comprising a nucleotide sequence described by the | |
| | general formula of a-b, where a is any integer between 1 to 4627 of | |
| | SEQ ID NO:686, b is an integer of 15 to 4641, where both a and b | |
| | correspond to the positions of nucleotide residues shown in SEQ ID | |
| | NO:686, and where b is greater than or equal to a +14. | |
| 841226 | Preferably excluded from the present invention are one or more | |
| | polynucleotides comprising a nucleotide sequence described by the | |
| | general formula of a-b, where a is any integer between 1 to 386 of | |
| | SEQ ID NO:687, b is an integer of 15 to 400, where both a and b | |
| | correspond to the positions of nucleotide residues shown in SEQ ID | |
| | NO:687, and where b is greater than or equal to a +14. | |
| 841227 | Preferably excluded from the present invention are one or more | |
| | polynucleotides comprising a nucleotide sequence described by the | |
| | general formula of a-b, where a is any integer between 1 to 2737 of | |
| | SEQ ID NO:688, b is an integer of 15 to 2751, where both a and b | |
| | correspond to the positions of nucleotide residues shown in SEQ ID | |
| | NO;688, and where b is greater than or equal to a +14. | |
| 841228 | Preferably excluded from the present invention are one or more | |
| | polynucleotides comprising a nucleotide sequence described by the | |
| | general formula of a-b, where a is any integer between 1 to 955 of | |
| | SEQ ID NO:689, b is an integer of 15 to 969, where both a and b | |
| | correspond to the positions of nucleotide residues shown in SEQ ID | |
| | NO:689, and where b is greater than or equal to a +14. | |
| 841231 | Preferably excluded from the present invention are one or more | |
| | polynucleotides comprising a nucleotide sequence described by the | |
| | general formula of a-b, where a is any integer between 1 to 965 of | |
| | SEQ ID NO:690, b is an integer of 15 to 979, where both a and b | |
| | correspond to the positions of nucleotide residues shown in SEQ ID | |
| | NO:690, and where b is greater than or equal to a +14. | |
| 841232 | referably excluded from the present invention are one or more | AA187539, AA593955, AA865468, AA247589, AA292221, |
| | polynucleotides comprising a nucleotide sequence described by the | AA394258, A1090863, D20810 |
| | general formula of a-b, where a is any integer between 1 to 679 of | |
| | SEQ ID NO:691, b is an integer of 15 to 693, where both a and b | |
| | correspond to the positions of nucleotide residues shown in SEQ ID | |
| | NO:691, and where b is greater than or equal to a +14. | |
| 841233 | Preferably excluded from the present invention are one or more | T86954, T87037, T91296, R11017, T78621, T79104, T84877, |
| | polynucleotides comprising a nucleotide sequence described by the | R00236, R00549, R06637, R27822, R27923, R35744, R45232, |
| | general formula of a-b, where ais any integer between 1 to 1368 of | R45232, H21370, H21411, H51867, H60283, H60590, H67220, |
| | SEQ ID NO:692, b is an integer of 15 to 1382, where both a and b | H99964, N28349, N30781, N41554, W47213, W47113, W67148, |
| | correspond to the positions of nucleotide residues shown in SEQ ID | W67391, AA004695, AA004747, AA053562, AA053590, |
| | NO:692, and where b is greater than or equal to a +14. | AA281060, AA287033, AA490978, AA586578, AA720644, |
| | | AA766114, AA838572, AA907289, AA922314, AA923031, |
| | | AA977015, AA975857, A1085503, A1085638, AA642438, |
| | | AA399464, AA448558, AA449705, AA723708, AA781911, |
| | | AA846349, AA861478, AA907377, AA907376, AA909728, |
| | | AA913796, AA994740, A1017543, A1027687, A1042241, |
| | | A1081442, Z41060 |
| 841234 | Preferably excluded from the present invention are one or more | |
| | polynucleotides comprising a nucleotide sequence described by the | |
| | general formula of a-b, where a is any integer between 1 to 3084 of | |
| | SEQ ID NO:693, b is an integer of 15 to 3098, where both a and b | |
| | correspond to the positions of nucleotide residues shown in SEQ ID | |
| | NO:693, and where b is greater than or equal to a +14. | |
| 841236 | Preferably excluded from the present invention are one or more | |
| | polynucleotides comprising a nucleotide sequence described by the | |
| | general formula of a-b, where a is any integer between 1 to 475 of | |
| | SEQ ID NO:694, b is an integer of 15 to 489, where both a and b | |
| | correspond to the positions of nucleotide residues shown in SEQ ID | |
| | NO:694, and where b is greater than or equal to a +14. | |
| 841238 | Preferably excluded from the present invention are one or more | T40324, T41188, T74964, R10059, T80454, T85689, R12791, |
| | polynucleotides comprising a nucleotide sequence described by the | R19812, R24766, R24982, R33136, R33288, R39060, R43570, |
| | general formula of a-b, where a is any integer between 1 to 1830 of | R45243, R45498, R52595, R54047, R54048, R43570, R45243, |
| | SEQ ID NO:695, b is an integer of 15 to 1844, where both a and b | R45498, H19030, H19321, H24420, H42322, H51876, H72225, |
| | correspond to the positions of nucleotide residues shown in SEQ ID | H83771, H83913, H99717, N26245, N30134, N41682, N55555, |
| | NO:695, and where b is greater than or equal to a +14. | N75922, N76940, N80564, W04682, W07687, W31765, W59945, |
| | | W59946, W63652, W72530, W72085, W76498, W77868, |
| | | AA081593, AA082766, AA084671, AA085794, AA088881, |
| | | AA102302, AA127864, AA188946, AA188844, AA191212, |
| | | AA196628, AA196960, AA631298, AA639450, AA904092, |
| | | AA932353, AA961333, AA987825, AA988659, AA996270, |
| | | AA205904, AA209353, AA393979, AA435659, AA453452, |
| | | AA600183, AA663064, AA670333, AA774102, AA843676, |
| | | AA854275, T03100, T03322, A1031917, A1066639, A1077924, |
| | | A1078160, A1085089, T15361, T23623, T24082, Z42130, Z44535, |
| | | F01670, F03604, F04096, F07839, F12754, F10361, AA700109 |
| 841239 | Preferably excluded from the present invention are one or more | R99939, H63661 |
| | polynucleotides comprising a nucleotide sequence described by the | |
| | general formula of a-b, where a is any integer between 1 to 591 of | |
| | SEQ ID NO:696, b is an integer of 15 to 605, where both a and b | |
| | correspond to the positions of nucleotide residues shown in SEQ ID | |
| | NO:696, and where b is greater than or equal to a +14. | |
| 841242 | Preferably excluded from the present invention are one or more | |
| | polynucleotides comprising a nucleotide sequence described by the | |
| | general formula of a-b, where a is any integer between 1 to 526 of | |
| | SEQ ID NO:697, b is an integer of 15 to 540, where both a and b | |
| | correspond to the positions of nucleotide residues shown in SEQ ID | |
| | NO:697, and where b is greater than or equal to a +14. | |
| 841243 | Preferably excluded from the present invention are one or more | |
| | polynucleotides comprising a nucleotide sequence described by the | |
| | general formula of a-b, where a is any integer between 1 to 482 of | |
| | SEQ ID NO:698, b is an integer of 15 to 496, where both a and b | |
| | correspond to the positions of nucleotide residues shown in SEQ ID | |
| | NO:698, and where b is greater than or equal to a +14. | |
| 841248 | Preferably excluded from the present invention are one or more | |
| | polynucleotides comprising a nucleotide sequence described by the | |
| | general formula of a-b, where a is any integer between 1 to 973 of | |
| | SEQ ID NO:699, b is an integer of 15 to 987, where both a and b | |
| | correspond to the positions of nucleotide residues shown in SEQ ID | |
| | NO:699, and where b is greater than or equal to a +14. | |
| 841250 | Preferably excluded from the present invention are one or more | |
| | polynucleotides comprising a nucleotide sequence described by the | |
| | general formula of a-b, where a is any integer between 1 to 1661 of | |
| | SEQ ID NO:700, b is an integer of 15 to 1675, where both a and b | |
| | correspond to the positions of nucleotide residues shown in SEQ ID | |
| | NO:700, and where b is greater than or equal to a +14. | |
| 841251 | Preferably excluded from the present invention are one or more | |
| | polynucleotides comprising a nucleotide sequence described by the | |
| | general formula of a-b, where a is any integer between 1 to 542 of | |
| | SEQ ID NO:701, b is an integer of 15 to 556, where both a and b | |
| | correspond to the positions of nucleotide residues shown in SEQ ID | |
| | NO:701, and where b is greater than or equal to a +14. | |
| 841254 | Preferably excluded from the present invention are one or more | AA765476, AA807570, A1056471, A1075269, T24438 |
| | polynucleotides comprising a nucleotide sequence described by the | |
| | general formula of a-b, where a is any integer between 1 to 1124 of | |
| | SEQ ID NO:702, b is an integer of 15 to 1138, where both a and b | |
| | correspond to the positions of nucleotide residues shown in SEQ ID | |
| | NO:702, and where b is greater than or equal to a +14. | |
| 841263 | Preferably excluded from the present invention are one or more | H58432, AA996201, AA598598, AA676797 |
| | polynucleotides comprising a nucleotide sequence described by the | |
| | general formula of a-b, where a is any integer between 1 to 1048 of | |
| | SEQ ID NO:703, b is an integer of 15 to 1062, where both a and b | |
| | correspond to the positions of nucleotide residues shown in SEQ ID | |
| | NO:703, and where b is greater than or equal to a +14. | |
| 841266 | Preferably excluded from the present invention are one or more | AA194189, Z36730 |
| | polynucleotides comprising a nucleotide sequence described by the | |
| | general formula of a-b, where a is any integer between 1 to 851 of | |
| | SEQ ID NO:704, b is an integer of 15 to 865, where both a and b | |
| | correspond to the positions of nucleotide residues shown in SEQ ID | |
| | NO:704, and where b is greater than or equal to a +14. | |
| 841269 | Preferably excluded from the present invention are one or more | |
| | polynucleotides comprising a nucleotide sequence described by the | |
| | general formula of a-b, where a is any integer between 1 to 1369 of | |
| | SEQ ID NO:705, b is an integer of 15 to 1383, where both a and b | |
| | correspond to the positions of nucleotide residues shown in SEQ ID | |
| | NO:705, and where b is greater than or equal to a +14. | |
| 841272 | Preferably excluded from the present invention are one or more | |
| | polynucleotides comprising a nucleotide sequence described by the | |
| | general formula of a-b, where a is any integer between 1 to 1141 of | |
| | SEQ ID NO:706, b is an integer of 15 to 1155, where both a and b | |
| | correspond to the positions of nucleotide residues shown in SEQ ID | |
| | NO:706, and where b is greater than or equal to a +14. | |
| 841273 | Preferably excluded from the present invention are one or more | H03779, H16233, AA026349, AA192805, AA662333, F19078, |
| | polynucleotides comprising a nucleotide sequence described by the | AA192917, AA921922, AI014904, Z30103 |
| | general formula of a-b, where a is any integer between 1 to 1403 of | |
| | SEQ ID NO:707, b is an integer of 15 to 1417, where both a and b | |
| | correspond to the positions of nucleotide residues shown in SEQ ID | |
| | NO:707, and where b is greater than or equal to a +14. | |
| 841276 | Preferably excluded from the present invention are one or more | |
| | polynucleotides comprising a nucleotide sequence described by the | |
| | general formula of a-b, where a is any integer between 1 to 934 of | |
| | SEQ ID NO:708, b is an integer of 15 to 948, where both a and b | |
| | correspond to the positions of nucleotide residues shown in SEQ ID | |
| | NO:708, and where b is greater than or equal to a +14. | |
| 841277 | Preferably excluded from the present invention are one or more | |
| | polynucleotides comprising a nucleotide sequence described by the | |
| | general formula of a-b, where a is any integer between 1 to 1315 of | |
| | SEQ ID NO:709, b is an integer of 15 to 1329, where both a and b | |
| | correspond to the positions of nucleotide residues shown in SEQ ID | |
| | NO:709, and where b is greater than or equal to a +14. | |
| 841278 | Preferably excluded from the present invention are one or more | |
| | polynucleotides comprising a nucleotide sequence described by the | |
| | general formula of a-b, where a is any integer between 1 to 520 of | |
| | SEQ ID NO:710, b is an integer of 15 to 534, where both a and b | |
| | correspond to the positions of nucleotide residues shown in SEQ ID | |
| | NO:710, and where b is greater than or equal to a +14. | |
| 841279 | Preferably excluded from the present invention are one or more | R09746, R10170, R65983, R65982, AA159394 |
| | polynucleotides comprising a nucleotide sequence described by the | |
| | general formula of a-b, where a is any integer between 1 to 1129 of | |
| | SEQ ID NO:711, b is an integer of 15 to 1143, where both a and b | |
| | correspond to the positions of nucleotide residues shown in SEQ ID | |
| | NO:711, and where b is greater than or equal to a +14. | |
| 841280 | Preferably excluded from the present invention are one or more | R09747, R10073, R33389, R33390, R53830, R53881, R62135, |
| | polynucleotides comprising a nucleotide sequence described by the | R62236, R68366, R68572, H00283, H00284, H02853, H03749, |
| | general formula of a-b, where a is any integer between 1 to 3765 of | AA157541, AA158194, AA159297, AA548738, D82787, C02009, |
| | SEQ ID NO:712, b is an integer of 15 to 3779, where both a and b | AA443368, AA446944, AA431753, AA770228, AA947580, |
| | correspond to the positions of nucleotide residues shown in SEQ ID | AA947962, A109 1589, T485 13 |
| | NO:712, and where b is greater than or equal to a +14. | |
| 841282 | Preferably excluded from the present invention are one or more | T74298, R51507, R78167, H08569, N39881, N57231, AA460120, |
| | polynucleotides comprising a nucleotide sequence described by the | N56328, N83397, N86852, N87082, C04661, AA090325, |
| | general formula of a-b, where a is any integer between 1 to 1022 of | AA095234, AA095835, AA216220, AA904685, AA905691, |
| | SEQ ID NO:713, b is an integer of 15 to 1036, where both a and b | R26999, F12501 |
| | correspond to the positions of nucleotide residues shown in SEQ ID | |
| | NO:713, and where b is greater than or equal to a +14. | |
| 841283 | Preferably excluded from the present invention are one or more | T58069, T58183, R14589, R23688, R24089, R27635, R30799, |
| | polynucleotides comprising a nucleotide sequence described by the | R31679, R31721, R41362, R44141, R41362, R44141, R72635, |
| | general formula of a-b, where a is any integer between 1 to 4429 of | R72711, H02881, H17299, H17300, H44461, N33623, N49466, |
| | SEQ ID NO:714, b is an integer of 15 to 4443, where both a and b | W15423, W39662, W52186, W58286, W58287, AA034289, |
| | correspond to the positions of nucleotide residues shown in SEQ ID | AA035171, AA040731, AA041202, AA043194, AA043349, |
| | NO:714, and where b is greater than or equal to a +14. | AA043596, AA047418, AA047419, AA058764, AA101975, |
| | | AA112998, AA114961, AA114960, AA127933, AA126680, |
| | | AA156822, AA193516, AA195626, AA256538, AA256426, |
| | | AA468894, AA507356, AA507368, AA516516, AA534147, |
| | | AA555266, AA594917, AA631771, AA568460, AA715240, |
| | | AA838519, C04979, AA707718, AA709391, AA725438, |
| | | AA928191, A1024960, AI050938, AI074716, AI078311, |
| | | AA087155, A1088407, AI088592, AI089297, Z38688, Z42494, |
| | | AA683480, AA693964 |
| 841286 | Preferably excluded from the present invention are one or more | T69086, H9300, H21912, H27306, H27307, H44750, H44751, |
| | polynucleotides comprising a nucleotide sequence described by the | AA028928, AA031481, AA031460, AA036634, AA040943, |
| | general formula of a-b, where a is any integer between 1 to 2085 of | AA043170, AA042941, AA047185, AA057349, AA128136, |
| | SEQ ID NO:715, b is an integer of 15 to 2099, where both a and b | AA224030, AA287364, AA287502, AA493521, AA506405, |
| | correspond to the positions of nucleotide residues shown in SEQ ID | AA532934, AA635612, AA635790, AA017240, AA028927, |
| | NO:715, and where b is greater than or equal to a +14. | AA043023, AA084506, AA126989, AA653687, A1040204, A1095872 |
| 841287 | Preferably excluded from the present invention are one or more | |
| | polynucleotides comprising a nucleotide sequence described by the | |
| | general formula of a-b, where a is any integer between 1 to 560 of | |
| | SEQ ID NO:716, b is an integer of 15 to 574, where both a and b | |
| | correspond to the positions of nucleotide residues shown in SEQ ID | |
| | NO:716, and where b is greater than or equal to a +14. | |
| 841288 | Preferably excluded from the present invention are one or more | |
| | polynucleotides comprising a nucleotide sequence described by the | |
| | general formula of a-b, where a is any integer between 1 to 833 of | |
| | SEQ ID NO:717, b is an integer of 15 to 847, where both a and b | |
| | correspond to the positions of nucleotide residues shown in SEQ ID | |
| | NO:717, and where b is greater than or equal to a +14. | |
| 841291 | Preferably excluded from the present invention are one or more | |
| | polynucleotides comprising a nucleotide sequence described by the | |
| | general formula of a-b, where a is any integer between 1 to 2072 of | |
| | SEQ ID NO:718, b is an integer of 15 to 2086, where both a and b | |
| | correspond to the positions of nucleotide residues shown in SEQ ID | |
| | NO:718, and where b is greater than or equal to a +14. | |
| 841292 | Preferably excluded from the present invention are one or more | |
| | polynucleotides comprising a nucleotide sequence described by the | |
| | general formula of a-b, where a is any integer between 1 to 2404 of | |
| | SEQ ID NO:719, b is an integer of 15 to 2418, where both a and b | |
| | correspond to the positions of nucleotide residues shown in SEQ ID | |
| | NO:719, and where b is greater than or equal to a +14. | |
| 841294 | Preferably excluded from the present invention are one or more | |
| | polynucleotides comprising a nucleotide sequence described by the | |
| | general formula of a-b, where a is any integer between 1 to 2527 of | |
| | SEQ ID NO:720, b is an integer of 15 to 2541, where both a and b | |
| | correspond to the positions of nucleotide residues shown in SEQ ID | |
| | NO:720, and where b is greater than or equal to a +14. | |
| 841296 | Preferably excluded from the present invention are one or more | |
| | polynucleotides comprising a nucleotide sequence described by the | |
| | general formula of a-b, where a is any integer between 1 to 2157 of | |
| | SEQ ID NO:721, b is an integer of 15 to 2171, where both a and b | |
| | correspond to the positions of nucleotide residues shown in SEQ ID | |
| | NO:721, and where b is greater than or equal to a +14. | |
| 841298 | Preferably excluded from the present invention are one or more | |
| | polynucleotides comprising a nucleotide sequence described by the | |
| | general formula of a-b, where a is any integer between 1 to 1874 of | |
| | SEQ ID NO:722, b is an integer of 15 to 1888, where both a and b | |
| | correspond to the positions of nucleotide residues shown in SEQ ID | |
| | NO:722, and where b is greater than or equal to a +14. | |
| 841301 | Preferably excluded from the present invention are one or more | T64693, R51679, R56608, H47224, N50001, N79401, W19677, |
| | polynucleotides comprising a nucleotide sequence described by the | AA143155, H59350, H69073, AA580509, AA487750, AA626464, |
| | general formula of a-b, where a is any integer between 1 to 966 of | T10911, T11398, T18502, T18605, T61708, F00905, F01050, |
| | SEQ ID NO:723, b is an integer of 15 to 980, where both a and b | F00254, F01088, F01138 |
| | correspond to the positions of nucleotide residues shown in SEQ ID | |
| | NO:723, and where b is greater than or equal to a +14. | |
| 841303 | Preferably excluded from the present invention are one or more | T80083, R18593, R24742, R27700, R38770, R43007, R43007, |
| | polynucleotides comprising a nucleotide sequence described by the | H5446, H15504, H22797, H23005, H24923, N94968, W30841, |
| | general formula of a-b, where a is any integer between 1 to 1798 of | W39757, W40248, W84533, AA033611, AA127942, AA127976, |
| | SEQ ID NO:724, b is an integer of 15 to 1812, where both a and b | AA132110, AA148952, AA148953, AA513119, AA524721, |
| | correspond to the positions of nucleotide residues shown in SEQ ID | AA551707, AA564773, AA662707, AA814997, AA910847, |
| | NO:724, and where b is greater than or equal to a +14. | AA927433, AA886610, W05640, W19569, W22703, W39296, |
| | | C04698, AA096287, C75085, AA704257, A1032787, A1075657, |
| | | A1086246, F04646, F08424, F00247 |
| 841304 | Preferably excluded from the present invention are one or more | |
| | polynucleotides comprising a nucleotide sequence described by the | |
| | general formula of a-b, where a is any integer between 1 to 960 of | |
| | SEQ ID NO:725, b is an integer of 15 to 974, where both a and b | |
| | correspond to the positions of nucleotide residues shown in SEQ ID | |
| | NO:725, and where b is greater than or equal to a +14. | |
| 841305 | Preferably excluded from the present invention are one or more | |
| | polynucleotides comprising a nucleotide sequence described by the | |
| | general formula of a-b, where a is any integer between 1 to 1494 of | |
| | SEQ ID NO:726, b is an integer of 15 to 1508, where both a and b | |
| | correspond to the positions of nucleotide residues shown in SEQ ID | |
| | NO:726, and where b is greater than or equal to a +14. | |
| 841309 | Preferably excluded from the present invention are one or more | R62724, H42483, H71117, H71118, N92184, N94614, W39691, |
| | polynucleotides comprising a nucleotide sequence described by the | W45047, W49839, AA046636, AA046775, AA047446, |
| | general formula of a-b, where a is any integer between ito 1990 of | AA047503, AA160181, AA488796, AA741383, AA746409, |
| | SEQ ID NO:727, b is an integer of 15 to 2004, where both a and b | AA811149, AA833797, AA946892, AA999767, AA249075, |
| | correspond to the positions of nucleotide residues shown in SEQ ID | AA248881, AA451825, AA454157, AA628416, AA846238, |
| | NO:727, and where b is greater than or equal to a +14. | A1004357 |
| 841314 | Preferably excluded from the present invention are one or more | |
| | polynucleotides comprising a nucleotide sequence described by the | |
| | general formula of a-b, where a is any integer between 1 to 1456 of | |
| | SEQ ID NO:728, b is an integer of 15 to 1470, where both a and b | |
| | correspond to the positions of nucleotide residues shown in SEQ ID | |
| | NO:728, and where b is greater than or equal to a +14. | |
| 841316 | Preferably excluded from the present invention are one or more | |
| | polynucleotides comprising a nucleotide sequence described by the | |
| | general formula of a-b, where a is any integer between 1 to 1741 of | |
| | SEQ ID NO:729, b is an integer of 15 to 1755, where both a and b | |
| | correspond to the positions of nucleotide residues shown in SEQ ID | |
| | NO:729, and where b is greater than or equal to a +14. | |
| 841318 | Preferably excluded from the present invention are one or more | |
| | polynucleotides comprising a nucleotide sequence described by the | |
| | general formula of a-b, where a is any integer between 1 to 423 of | |
| | SEQ ID NO:730, b is an integer of 15 to 437, where both a and b | |
| | correspond to the positions of nucleotide residues shown in SEQ ID | |
| | NO:730, and where b is greater than or equal to a +14. | |
| 841321 | Preferably excluded from the present invention are one or more | |
| | polynucleotides comprising a nucleotide sequence described by the | |
| | general formula of a-b, where a is any integer between 1 to 3649 of | |
| | SEQ ID NO:731, b is an integer of 15 to 3663, where both a and b | |
| | correspond to the positions of nucleotide residues shown in SEQ ID | |
| | NO:731, and where b is greater than or equal to a +14. | |
| 841324 | Preferably excluded from the present invention are one or more | T96831, AA258405, AA258750, H61868, AA828983, AA447894, |
| | polynucleotides comprising a nucleotide sequence described by the | T96832 |
| | general formula of a-b, where a is any integer between 1 to 2003 of | |
| | SEQ ID NO:732, b is an integer of 15 to 2017, where both a and b | |
| | correspond to the positions of nucleotide residues shown in SEQ ID | |
| | NO:732, and where b is greater than or equal to a +14. | |
| 841326 | Preferably excluded from the present invention are one or more | T67169, T67170, R13400, R25161, R40914, R81373, H03937, |
| | polynucleotides comprising a nucleotide sequence described by the | N32627, N46428, N47847, N99904, W25263, W56840, W60329, |
| | general formula of a-b, where a is any integer between 1 to 1990 of | W86618, W86691, AA062970, AA082457, AA100373, |
| | SEQ ID NO:733, b is an integer of 15 to 2004, where both a and b | AA101448, AA126274, AA134708, AA150508, AA156712, |
| | correspond to the positions of nucleotide residues shown in SEQ ID | AA157068, AA156974, AA165009, AA171491, AA171862, |
| | NO:733, and where b is greater than or equal to a +14. | AA179767, AA180187, AA180497, AA179780, AA180441, |
| | | AA187010, AA190353, AA195448, AA227391, AA258327, |
| | | AA258536, AA262632, AA489087, AA489151, AA503664, |
| | | AA523741, AA582440, AA588337, AA621830, AA621902, |
| | | AA640554, AA568289, AA744568, AA761881, AA827997, |
| | | AA847455, AA913189, AA913652, AA974509, U46229, N84275, |
| | | N85488, N87880, AA641297, C21410, AA091107, AA095442, |
| | | AA209417, AA219739, AA599903, AA676460, AA677610, |
| | | AA678785, AA707112, AA725266,AA757097, AA779171, |
| | | AA779610, AA852239, AA773175, AA993290, A1023440, |
| | | A1026810, A1039755, A1082013, A1089353, AA773895 |
| 841328 | Preferably excluded from the present invention are one or more | R93165, R93258, AA115956, AA251714, AA206198, AA676321 |
| | polynucleotides comprising a nucleotide sequence described by the | |
| | general formula of a-b, where a is any integer between 1 to 1114 of | |
| | SEQ ID NO:734, b is an integer of 15 to 1128, where both a and b | |
| | correspond to the positions of nucleotide residues shown in SEQ ID | |
| | NO:734, and where b is greater than or equal to a +14. | |
| 841329 | Preferably excluded from the present invention are one or more | |
| | polynucleotides comprising a nucleotide sequence described by the | |
| | general formula of a-b, where a is any integer between 1 to 758 of | |
| | SEQ ID NO:735, b is an integer of 15 to 772, where both a and b | |
| | correspond to the positions of nucleotide residues shown in SEQ ID | |
| | NO:735, and where b is greater than or equal to a +14. | |
| 841330 | Preferably excluded from the present invention are one or more | R22883, R66728, R78688, H95005, H95113, N27178, N39923, |
| | polynucleotides comprising a nucleotide sequence described by the | AA037201, AA991171, U69556, AA913589, A1085980 |
| | general formula of a-b, where a is any integer between 1 to 1085 of | |
| | SEQ ID NO:736, b is an integer of 15 to 1099, where both a and b | |
| | correspond to the positions of nucleotide residues shown in SEQ ID | |
| | NO:736, and where b is greater than or equal to a +14. | |
| 841333 | Preferably excluded from the present invention are one or more | T59818, T59682, R12623, R20524, R21444, R35122, R20524, |
| | polynucleotides comprising a nucleotide sequence described by the | R64024, H89257, N93515, W21251, W33070, W35419, W96447, |
| | general formula of a-b, where a is any integer between 1 to 3205 of | W96544, AA039907, AA043958, AA043824, AA045684, |
| | SEQ ID NO:737, b is an integer of 15 to 3219, where both a and b | AA045685, AA088865, AA099890, AA126585, AA127996, |
| | correspond to the positions of nucleotide residues shown in SEQ ID | AA128092, AA176159, AA491962, AA595337, AA610623, |
| | NO:737, and where b is greater than or equal to a +14. | AA668991, AA688420, AA765329, AA768238, AA831102, |
| | | AA908487, D81709, N89092, C02635, C04695, AA416971, |
| | | AA469921, AA598468, AA634649, AA939133, AA995031, |
| | | A1082151, A1123086, T19281 |
| 841334 Preferably excluded from the present invention are one or more | | |
| | polynucleotides comprising a nucleotide sequence described by the | |
| | general formula of a-b, where a is any integer between 1 to 835 of | |
| | SEQ ID NO:738, b is an integer of 15 to 849, where both a and b | |
| | correspond to the positions of nucleotide residues shown in SEQ ID | |
| | NO:738, and where b is greater than or equal to a +14. | |
| 841335 | Preferably excluded from the present invention are one or more | R22949, R23055, R78445, W19388, AA126774, AA133979, |
| | polynucleotides comprising a nucleotide sequence described by the | AA173276, AA210721, AA210826, AA287324, AA287338, |
| | general formula of a-b, where a is any integer between 1 to 2055 of | AA504314, AA688155, AA829651, AA836121, AA934545, |
| | SEQ ID NO:739, b is an integer of 15 to 2069, where both a and b | A1004681, AA205833, AA628867, A1028632, A1026835, |
| | correspond to the positions of nucleotide residues shown in SEQ ID | A1075920 |
| | NO:739, and where b is greater than or equal to a +14. | |
| 841336 | Preferably excluded from the present invention are one or more | |
| | polynucleotides comprising a nucleotide sequence described by the | |
| | general formula of a-b, where a is any integer between 1 to 1553 of | |
| | SEQ ID NO:740, b is an integer of 15 to 1567, where both a and b | |
| | correspond to the positions of nucleotide residues shown in SEQ ID | |
| | NO:740, and where b is greater than or equal to a +14. | |
| 841337 | Preferably excluded from the present invention are one or more | |
| | polynucleotides comprising a nucleotide sequence described by the | |
| | general formula of a-b, where a is any integer between 1 to 2815 of | |
| | SEQ ID NO:741, b is an integer of 15 to 2829, where both a and b | |
| | correspond to the positions of nucleotide residues shown in SEQ ID | |
| | NO:741, and where b is greater than or equal to a +14. | |
| 841339 | Preferably excluded from the present invention are one or more | R05977, W07729, W85962 |
| | polynucleotides comprising a nucleotide sequence described by the | |
| | general formula of a-b, where a is any integer between 1 to 912 of | |
| | SEQ ID NO:742, b is an integer of 15 to 926, where both a and b | |
| | correspond to the positions of nucleotide residues shown in SEQ ID | |
| | NO:742, and where b is greater than or equal to a +14. | |
| 841340 | Preferably excluded from the present invention are one or more | T87162, T87245, R83644, H65997, W86660, W87319, AA279035, |
| | polynucleotides comprising a nucleotide sequence described by the | Z5793 |
| | general formula of a-b, where a is any integer between 1 to 1003 of | |
| | SEQ ID NO:743, b is an integer of 15 to 1017, where both a and b | |
| | correspond to the positions of nucleotide residues shown in SEQ ID | |
| | NO:743, and where b is greater than or equal to a +14. | |
| 841341 | Preferably excluded from the present invention are one or more | |
| | polynucleotides comprising a nucleotide sequence described by the | |
| | general formula of a-b, where a is any integer between 1 to 347 of | |
| | SEQ ID NO:744, b is an integer of 15 to 361, where both a and b | |
| | correspond to the positions of nucleotide residues shown in SEQ ID | |
| | NO:744, and where b is greater than or equal to a +14. | |
| 841342 | Preferably excluded from the present invention are one or more | T61211, R31792, R31806, R31842, R31858, AA463633, |
| | polynucleotides comprising a nucleotide sequence described by the | AA279178, AA279190, AA419400, AA482006, AA521039, |
| | general formula of a-b, where a is any integer between 1 to 1922 of | AA528684, D80048, AA649649, AA651768, AA652075, |
| | SEQ ID NO:745, b is an integer of 15 to 1936, where both a and b | AA652129, AA293205, AA293206, AA443179, AA936343 |
| | correspond to the positions of nucleotide residues shown in SEQ ID | |
| | NO:745, and where b is greater than or equal to a +14. | |
| 841343 | Preferably excluded from the present invention are one or more | T72227, T92679, R30797, H88591, H97509, N22238, N28360, |
| | polynucleotides comprising a nucleotide sequence described by the | AA045341, AA045429, AA054480, AA058517, AA085747, |
| | general formula of a-b, where a is any integer between 1 to 1605 of | AA111873, AA112181, AA128375, AA146828, AA146642, |
| | SEQ ID NO:746, b is an integer of 15 to 1619, where both a and b | AA169595, AA194346, AA194443, AA425051, AA491535, |
| | correspond to the positions of nucleotide residues shown in SEQ ID | AA491727, AA553943, AA603289, AA604115, AA618399, |
| | NO:746, and where b is greater than or equal to a +14. | AA631253, AA632743, AA640345, AA565849, AA657551, |
| | | AA657552, AA747335, AA888284, AA903805, AA903460, |
| | | AA932251, AA932650, A1074492, W26992, W27525, AA092612, |
| | | AA093936, AA095079, AA495989, AA844221, AA845438, |
| | | AA897210, AA928087, AA970794, A1083509, F04554, F00612 |
| 841347 | Preferably excluded from the present invention are one or more | R14800, R25047, R59757, W23811, Z42261 |
| | polynucleotides comprising a nucleotide sequence described by the | |
| | general formula of a-b, where a is any integer between 1 to 478 of | |
| | SEQ ID NO:747, b is an integer of 15 to 492, where both a and b | |
| | correspond to the positions of nucleotide residues shown in SEQ ID | |
| | NO;747, and where b is greater than or equal to a +14. | |
| 841352 | Preferably excluded from the present invention are one or more | T39621, T47602, T47603, T50214, T50262, T56171, T59994, |
| | polynucleotides comprising a nucleotide sequence described by the | N69976, N70656, N92997, N98578, W19319, W21208, W25470, |
| | general formula of a-b, where a is any integer between 1 to 589 of | W38523, W79772, W79108, N90073, AA082281, AA083720, |
| | SEQ ID NO:748, b is an integer of 15 to 603, where both a and b | AA102538, AA111985, AA130519, AA130518, AA131208, |
| | correspond to the positions of nucleotide residues shown in SEQ ID | AA155889, AA156193, AA157132, AA157188, AA159333, |
| | NO:748, and where b is greater than or equal to a +14. | AA159346, AA159404, AA159443, AA166964, AA167042, |
| | | AA425520, AA228398, AA228399, AA230245, AA420475, |
| | | AA470507, AA470518, AA470554, AA470564, AA470784, |
| | | AA480624, AA482721, AA483943, AA484448, AA492057, |
| | | AA492060, AA501534, AA501688, AA501705, AA502485, |
| | | AA503438, AA507807, AA522865, AA523150, AA523460, |
| | | AA525078, AA531038, AA532886, AA534182, AA535479, |
| | | AA541295, AA548431, AA559139, AA558899, AA559895, |
| | | F16130, F17508, AA582864, AA582977, AA594817, AA600752, |
| | | AA602218, AA603293, AA603440, AA614252, AA614593, |
| | | AA627143, AA631240, AA639097, AA640665, AA569026, |
| | | AA569795, AA573527, AA578708, AA578892, AA579475, |
| | | AA580548, AA568421, AA654902, AA655027, AA657423, |
| | | AA657485, AA657617, AA657745, AA657873, AA658089, |
| | | AA659338, AA661580, AA662328, AA662945, AA664742, |
| | | AA714342, AA721063, AA729626, AA729804, AA730697, |
| | | AA737143, AA746051, AA814722, AA826140, AA838575, |
| | | AA856900, AA857814, AA876960, AA879008, AA879230, |
| | | AA886873, AA887104, AA888489, AA908834, AA922670, |
| | | AA907193, AA931585, AA939179, AA969542, AA978087, |
| | | AA988995, A1000230, A1002473, A1056486, A1066507, D45301, |
| | | A1089666, A1094699, N84532, N84765, N86425, N89209, |
| | | C14372, C14508, C14515, C14530, C14555, C14605, C14770, |
| | | C14788, C14791, AA640945, C14863, C14868, AA090649, |
| | | C14935, C15107, C15223, C15471, C15682, C15775, C15870, |
| | | C15930, C15935, AA131294, AA643297, AA643298, AA643790, |
| | | AA650598, AA652545, AA653802, AA653817, AA216075, |
| | | AA216113, AA216340, AA249201, F20411, F20721, AA457776, |
| | | AA478848, AA478850, AA479946, AA489323, AA609264, |
| | | AA625634, AA669489, AA457581, F22821, AA845104, T25813, |
| | | T26333, AA968927, A1080006, A1080259, D19689, T50162, |
| | | T59495, F13766, AA694377 |
| 841353 | Preferably excluded from the present invention are one or more | N70887, N80736, W06893, W07533, W86227, W86228, |
| | polynucleotides comprising a nucleotide sequence described by the | AA101268, AA877981, D79871, D81890, AA206735, AA205181, |
| | general formula of a-b, where a is any integer between 1 to 2031 of | AA205255, AA205303, AA447456, AA454967, AA454966, |
| | SEQ ID NO:749, b is an integer of 15 to 2045, where both a and b | AA778336, AA970143, T18602, D21013, Z38951, Z45683, |
| | correspond to the positions of nucleotide residues shown in SEQ ID | T27468, T27472, F06030, F04572 |
| | NO:749, and where b is greater than or equal to a +14. | |
| 841354 | Preferably excluded from the present invention are one or more | H08639, W86219, AA136665, AA136781, AA256507, AA256508, |
| | polynucleotides comprising a nucleotide sequence described by the | AA603334, AA830237, AA978040, AA987352, AA733094, |
| | general formula of a-b, where a is any integer between 1 to 1130 of | T10254, Z40940 |
| | SEQ ID NO:750, b is an integer of 15 to 1144, where both a and b | |
| | correspond to the positions of nucleotide residues shown in SEQ ID | |
| | NO:750, and where b is greater than or equal to a +14. | |
| 841360 | Preferably excluded from the present invention are one or more | |
| | polynucleotides comprising a nucleotide sequence described by the | |
| | general formula of a-b, where a is any integer between 1 to 1584 of | |
| | SEQ ID NO:751, b is an integer of 15 to 1598, where both a and b | |
| | correspond to the positions of nucleotide residues shown in SEQ ID | |
| | NO:751, and where b is greater than or equal to a +14. | |
| 841366 | Preferably excluded from the present invention are one or more | |
| | polynucleotides comprising a nucleotide sequence described by the | |
| | general formula of a-b, where a is any integer between 1 to 1471 of | |
| | SEQ ID NO:752, b is an integer of 15 to 1485, where both a and b | |
| | correspond to the positions of nucleotide residues shown in SEQ ID | |
| | NO:752, and where b is greater than or equal to a +14. | |
| 841405 | Preferably excluded from the present invention are one or more | |
| | polynucleotides comprising a nucleotide sequence described by the | |
| | general formula of a-b, where a is any integer between 1 to 1742 of | |
| | SEQ ID NO:753, b is an integer of 15 to 1756, where both a and b | |
| | correspond to the positions of nucleotide residues shown in SEQ ID | |
| | NO:753, and where b is greater than or equal to a +14. | |
| 841526 | Preferably excluded from the present invention are one or more | |
| | polynucleotides comprising a nucleotide sequence described by the | |
| | general formula of a-b, where a is any integer between 1 to 1781 of | |
| | SEQ ID NO:754, b is an integer of 15 to 1795, where both a and b | |
| | correspond to the positions of nucleotide residues shown in SEQ ID | |
| | NO:754, and where b is greater than or equal to a +14. | |
| 841712 | Preferably excluded from the present invention are one or more | |
| | polynucleotides comprising a nucleotide sequence described by the | |
| | general formula of a-b, where a is any integer between 1 to 1266 of | |
| | SEQ ID NO:755, b is an integer of 15 to 1280, where both a and b | |
| | correspond to the positions of nucleotide residues shown in SEQ ID | |
| | NO:755, and where b is greater than or equal to a +14. | |
| 841860 | Preferably excluded from the present invention are one or more | |
| | polynucleotides comprising a nucleotide sequence described by the | |
| | general formula of a-b, where a is any integer between 1 to 3651 of | |
| | SEQ ID NO:756, b is an integer of 15 to 3665, where both a and b | |
| | correspond to the positions of nucleotide residues shown in SEQ ID | |
| | NO:756, and where b is greater than or equal to a +14. | |
| 842042 | Preferably excluded from the present invention are one or more | R27775, R80938, R81040, H25849, H30556, H39898, H43685, |
| | polynucleotides comprising a nucleotide sequence described by the | H84621, H85342, H85863, H97623, N20020, N24066, N27150, |
| | general formula of a-b, where a is any integer between 1 to 1207 of | N34137, N74869, AA013261, AA018222, AA056554, AA075594, |
| | SEQ ID NO:757, b is an integer of 15 to 1221, where both a and b | AA111995, AA176737, AA196064, AA514335, AA731163, |
| | correspond to the positions of nucleotide residues shown in SEQ ID | AA732094, AA769189, AA877155, AA887521, AA887647, |
| | NO:757, and where b is greater than or equal to a +14. | AA915962, A1017806, C03891, AA648526, AA411503, |
| | | AA890618, T03509, T11362, F00065 |
| 842453 | Preferably excluded from the present invention are one or more | |
| | polynucleotides comprising a nucleotide sequence described by the | |
| | general formula of a-b, where a is any integer between 1 to 617 of | |
| | SEQ ID NO:758, b is an integer of 15 to 631, where both a and b | |
| | correspond to the positions of nucleotide residues shown in SEQ ID | |
| | NO:758, and where b is greater than or equal to a +14. | |
| 842635 | Preferably excluded from the present invention are one or more | |
| | polynucleotides comprising a nucleotide sequence described by the | |
| | general formula of a-b, where a is any integer between 1 to 2482 of | |
| | SEQ ID NO:759, b is an integer of 15 to 2496, where both a and b | |
| | correspond to the positions of nucleotide residues shown in SEQ ID | |
| | NO:759, and where b is greater than or equal to a +14. | |
| 842927 | Preferably excluded from the present invention are one or more | R09931, T99454, R02759, R86215, H59062, AA193428, |
| | polynucleotides comprising a nucleotide sequence described by the | AA193451, AA235140, Z45646 |
| | general formula of a-b, where a is any integer between 1 to 2034 of | |
| | SEQ ID NO:760, b is an integer of 15 to 2048, where both a and b | |
| | correspond to the positions of nucleotide residues shown in SEQ ID | |
| | NO:760, and where b is greater than or equal to a +14. | |
| 842988 | Preferably excluded from the present invention are one or more | R18558, R33656, R33770, R41425, R41425, R62291, R62292, |
| | polynucleotides comprising a nucleotide sequence described by the | H00771, H03451, H03535, H1769, H2026, H16764, H16873, |
| | general formula of a-b, where a is any integer between 1 to 1743 of | H25402, H25403, H25761, H25802, H26331, N27708, N33053, |
| | SEQ ID NO:761, b is an integer of 15 to 1757, where both a and b | N35107, N36527, N48776, N62848, N77755, W48862, W48734, |
| | correspond to the positions of nucleotide residues shown in SEQ ID | AA016281, AA040052, AA045034, AA151597, AA149477, |
| | NO:761, and where b is greater than or equal to a +14. | AA150284, AA150386, AA421931, AA458926, AA805628, |
| | | AA831459, AA862368, AA946706, A1017010, D80611, D80610, |
| | | D79660, Z78342, C21502, AA428166, AA446595, AA452707, |
| | | AA718983, AA722005, AA861846, A1025497, A1051843, |
| | | Z24971, Z28673, Z40541, Z44707 |
| 843080 | Preferably excluded from the present invention are one or more | |
| | polynucleotides comprising a nucleotide sequence described by the | |
| | general formula of a-b, where a is any integer between 1 to 4434 of | |
| | SEQ ID NO:762, b is an integer of 15 to 4448, where both a and b | |
| | correspond to the positions of nucleotide residues shown in SEQ ID | |
| | NO:762, and where b is greater than or equal to a +14. | |
| 843237 | Preferably excluded from the present invention are one or more | |
| | polynucleotides comprising a nucleotide sequence described by the | |
| | general formula of a-b, where a is any integer between 1 to 2876 of | |
| | SEQ ID NO:763, b is an integer of 15 to 2890, where both a and b | |
| | correspond to the positions of nucleotide residues shown in SEQ ID | |
| | NO:763, and where b is greater than or equal to a +14. | |
| 843381 | Preferably excluded from the present invention are one or more | |
| | polynucleotides comprising a nucleotide sequence described by the | |
| | general formula of a-b, where a is any integer between 1 to 1689 of | |
| | SEQ ID NO:764, b is an integer of 15 to 1703, where both a and b | |
| | correspond to the positions of nucleotide residues shown in SEQ ID | |
| | NO:764, and where b is reater than or e ual to a +14. | |
| 843718 | Preferably excluded from the present invention are one or more | |
| | polynucleotides comprising a nucleotide sequence described by the | |
| | general formula of a-b, where a is any integer between 1 to 248 of | |
| | SEQ ID NO:765, b is an integer of 15 to 262, where both a and b | |
| | correspond to the positions of nucleotide residues shown in SEQ ID | |
| | NO:765, and where b is greater than or equal to a +14. | |
| 843823 | Preferably excluded from the present invention are one or more | |
| | polynucleotides comprising a nucleotide sequence described by the | |
| | general formula of a-b, where a is any integer between 1 to 3058 of | |
| | SEQ ID NO:766, b is an integer of 15 to 3072, where both a and b | |
| | correspond to the positions of nucleotide residues shown in SEQ ID | |
| | NO:766, and where b is greater than or equal to a +14. | |
| 844056 | Preferably excluded from the present invention are one or more | |
| | polynucleotides comprising a nucleotide sequence described by the | |
| | general formula of a-b, where a is any integer between 1 to 1307 of | |
| | SEQ ID NO:767, b is an integer of 15 to 1321, where both a and b | |
| | correspond to the positions of nucleotide residues shown in SEQ ID | |
| | NO:767, and where b is greater than or equal to a +14. | |
| 844325 | Preferably excluded from the present invention are one or more | H13033, H19108, W17353 |
| | polynucleotides comprising a nucleotide sequence described by the | |
| | general formula of a-b, where a is any integer between 1 to 1518 of | |
| | SEQ ID NO:768, b is an integer of 15 to 1532, where both a and b | |
| | correspond to the positions of nucleotide residues shown in SEQ ID | |
| | NO:768, and where b is greater than or equal to a +14. | |
| 844344 | Preferably excluded from the present invention are one or more | |
| | polynucleotides comprising a nucleotide sequence described by the | |
| | general formula of a-b, where a is any integer between 1 to 2555 of | |
| | SEQ ID NO:769, b is an integer of 15 to 2569, where both a and b | |
| | correspond to the positions of nucleotide residues shown in SEQ ID | |
| | NO:769, and where b is greater than or equal to a +14. | |
| 844368 | Preferably excluded from the present invention are one or more | |
| | polynucleotides comprising a nucleotide sequence described by the | |
| | general formula of a-b, where a is any integer between 1 to 1623 of | |
| | SEQ ID NO:770, b is an integer of 15 to 1637, where both a and b | |
| | correspond to the positions of nucleotide residues shown in SEQ ID | |
| | NO:770, and where b is greater than or equal to a +14. | |
| 844408 | Preferably excluded from the present invention are one or more | R25739, R25848, R26585, R26669, R38347, R43382, R43382, |
| | polynucleotides comprising a nucleotide sequence described by the | R82340, R82389, H22162, H22213, H86274, H86550, H86638, |
| | general formula of a-b, where a is any integer between 1 to 2471 of | N48320, N49046, N73714, AA019818, AA122109, AA152348, |
| | SEQ ID NO:771, b is an integer of 15 to 2485, where both a and b | AA152349, AA158712, H86273, AA595813, AA612911, |
| | correspond to the positions of nucleotide residues shown in SEQ ID | AA995417, C04219, AA018291, AA442061, AA442163, |
| | NO:771, and where b is greater than or equal to a +14. | AA724417, AA923788, T03807, A1038239, A1051425, Z39949, |
| | | F03166, F06863, F06899, F10884 |
| 844508 | Preferably excluded from the present invention are one or more | AA043997 |
| | polynucleotides comprising a nucleotide sequence described by the | |
| | general formula of a-b, where a is any integer between 1 to 418 of | |
| | SEQ ID NO:772, b is an integer of 15 to 432, where both a and b | |
| | correspond to the positions of nucleotide residues shown in SEQ ID | |
| | NO:772, and where b is greater than or equal to a +14. | |
| 844867 | Preferably excluded from the present invention are one or more | R23270, R24465, H26326, N67923, AA181941, AA187906, |
| | polynucleotides comprising a nucleotide sequence described by the | AA687695, AA740438, AA879229, D81116, D81140 |
| | general formula of a-b, where a is any integer between 1 to 1034 of | |
| | SEQ ID NO:773, b is an integer of 15 to 1048, where both a and b | |
| | correspond to the positions of nucleotide residues shown in SEQ ID | |
| | NO:773, and where b is greater than or equal to a +14. | |
| 845000 | Preferably excluded from the present invention are one or more | R22590, H92298, W04657, W31581, W37780, W39080 |
| | polynucleotides comprising a nucleotide sequence described by the | |
| | general formula of a-b, where a is any integer between 1 to 1005 of | |
| | SEQ ID NO:774, b is an integer of 15 to 1019, where both a and b | |
| | correspond to the positions of nucleotide residues shown in SEQ ID | |
| | NO:774, and where b is greater than or equal to a +14. | |
| 845281 | Preferably excluded from the present invention are one or more | T92139, T93566, T94885, T94933, R15017, R17377, R25556, |
| | polynucleotides comprising a nucleotide sequence described by the | R25791, R26489, R26511, R46713, R46790, R53266, R41457, |
| | general formula of a-b, where a is any integer between 1 to 2234 of | R46790, R46713, R95961, R95995, R96764, R97692, H56545, |
| | SEQ ID NO:775, b is an integer of 15 to 2248, where both a and b | H89870, H89871, H89871, N22103, N39443, N45521, N48555, |
| | correspond to the positions of nucleotide residues shown in SEQ ID | N67524, N67561, N75299, N75567, N75882, W04741, W05590, |
| | NO:775, and where b is greater than or equal to a +14. | W57992, W58076, AA001138, AA001282, AA001943, |
| | | AA001919, AA027274, AA029603, AA082792, AA102442, |
| | | AA101126, AA150932, AA150901, AA176661, AA176888, |
| | | AA223622, AA461513, AA177059, AA229768, AA230089, |
| | | AA493436, AA516126, AA528397, AA551566, AA583433, |
| | | AA610274, AA613338, AA665090, AA744004, AA744054, |
| | | AA770662, AA829788, AA865467, AA864190, AA878328, |
| | | AA922466, AA932042, AA933800, AA935845, AA973926, |
| | | AA977231, AA988822, AA992503, AA995390, A1082412, |
| | | A1094769, D82171, N85713, W25970, W28703, C00856, C04813, |
| | | C05281, AA648060, AA650341, AA651636, AA452618, |
| | | AA453239, AA626597, AA670375, AA679935, AA722603, |
| | | A1034036, A1056096, T16991, T23523, T19071, F01728, F02334, |
| | | F05468, F06081, F04719, F08503 |
| 845288 | Preferably excluded from the present invention are one or more | |
| | polynucleotides comprising a nucleotide sequence described by the | |
| | general formula of a-b, where a is any integer between 1 to 1591 of | |
| | SEQ ID NO:776, b is an integer of 15 to 1605, where both a and b | |
| | correspond to the positions of nucleotide residues shown in SEQ ID | |
| | NO:776, and where b is greater than or equal to a +14. | |
| 845750 | Preferably excluded from the present invention are one or more | T54633, T54715, T59162, T59200, T65736, T65810, R13590, |
| | polynucleotides comprising a nucleotide sequence described by the | R71878, H71816, H71817, H75311, H78458, H93320, H93493, |
| | general formula of a-b, where a is any integer between 1 to 1794 of | N49894, N49998, N79774, N93610, W07272, W25098, W25505, |
| | SEQ ID NO:777, b is an integer of 15 to 1808, where both a and b | W79872, W80977, W81080, AA010657, AA010658, AA024456, |
| | correspond to the positions of nucleotide residues shown in SEQ ID | AA024672, AA053380, AA053095, AA148051, AA196637, |
| | NO:777, and where b is greater than or equal to a +14. | AA196919, AA223159, AA234295, AA262985, AA425287, |
| | | AA425492, AA551815, AA552317, AA614604, AA617675, |
| | | AA639422, AA570121, AA568154, AA847251, AA983567, |
| | | A1015662, C00349, N87765, C02759, C03904, C04889, C05299, |
| | | C05572, AA248273, AA290679, AA402015, AA402941, |
| | | AA411366, AA411367, AA411431, AA411547, AA481876, |
| | | AA482058, A1032553, A1038761, A1077405, A1088638, T16907, |
| | | F16906, D31160, D31471, F02456, F02921, F02975, F06184, |
| | | F06650 |
| 845809 | Preferably excluded from the present invention are one or more | |
| | polynucleotides comprising a nucleotide sequence described by the | |
| | general formula of a-b, where a is any integer between 1 to 1470 of | |
| | SEQ ID NO:778, b is an integer of 15 to 1484, where both a and b | |
| | correspond to the positions of nucleotide residues shown in SEQ ID | |
| | NO:778, and where b is greater than or equal to a +14. | |
| 846077 | Preferably excluded from the present invention are one or more | |
| | polynucleotides comprising a nucleotide sequence described by the | |
| | general formula of a-b, where a is any integer between 1 to 1329 of | |
| | SEQ ID NO:779, b is an integer of 15 to 1343, where both a and b | |
| | correspond to the positions of nucleotide residues shown in SEQ ID | |
| | NO:779, and where b is greater than or equal to a +14. | |

[0057] Polynucleotide and Polypeptide Variants

[0058] The present invention is directed to variants of the polynucleotide sequence disclosed in SEQ ID NO:X or the complementary stand thereto, and/or the cDNA sequence contained in a cDNA clone contained in the deposit.

[0059] The present invention also encompasses variants of the prostate and prostate cancer polypeptide sequence e in SEQ ID NO:Y, a polypeptide sequence encoded by the polynucleotide sequence in SEQ ID NO:X, and/or a polypeptide sequence encoded by the cDNA in the related cDNA clone contained in the deposit.

[0060] “Variant” refers to a polynucleotide or polypeptide differing from the polynucleotide or polypeptide of the present invention, but retaining essential properties thereof. Generally, variants are overall closely similar, and, in many regions, identical to the polynucleotide or polypeptide of the present invention.

[0061] The present invention is also directed to nucleic acid molecules which comprise, or alternatively consist of, a nucleotide sequence which is at least 80%, 85%, 90%, 95%, 96%, 97%, 98%, 99% or 100%, identical to, for example, the nucleotide coding sequence in SEQ ID NO:X or the complementary strand thereto, the nucleotide coding sequence of the related cDNA contained in a deposited library or the complementary strand thereto, a nucleotide sequence encoding the polypeptide of SEQ ID NO:Y, a nucleotide sequence encoding a polypeptide sequence encoded by the nucleotide sequence in SEQ ID NO:X, a nucleotide sequence encoding the polypeptide encoded by the cDNA in the related cDNA contained in a deposited library, and/or polynucleotide fragments of any of these nucleic acid molecules (e.g., those fragments described herein). Polypeptides encoded by these nucleic acid molecules are also encompassed by the invention. In another embodiment, the invention encompasses nucleic acid molecules which comprise or alternatively consist of, a polynucleotide which hybridizes under stringent hybridization conditions, or alternatively, under low stringency conditions, to the nucleotide coding sequence in SEQ ID NO:X, the nucleotide coding sequence of the related cDNA clone contained in a deposited library, a nucleotide sequence encoding the polypeptide of SEQ ID NO:Y, a nucleotide sequence encoding a polypeptide sequence encoded by the nucleotide sequence in SEQ ID NO:X, a nucleotide sequence encoding the polypeptide encoded by the cDNA in the related cDNA clone contained in a deposited library, and/or polynucleotide fragments of any of these nucleic acid molecules (e.g., those fragments described herein). Polynucleotides which hybridize to the complement of these nucleic acid molecules under stringent hybridization conditions or alternatively, under lower stringency conditions, are also encompassed by the invention, as are polypeptides encoded by these polynucleotides.

[0062] The present invention is also directed to polypeptides which comprise, or alternatively consist of, an amino acid sequence which is at least 80%, 85%, 90%, 95%, 96%, 97%, 98%, 99% or 100% identical to, for example, the polypeptide sequence shown in SEQ ID NO:Y, a polypeptide sequence encoded by the nucleotide sequence in SEQ ID NO:X, a polypeptide sequence encoded by the cDNA in the related cDNA clone contained in a deposited library, and/or polypeptide fragments of any of these polypeptides (e.g., those fragments described herein). Polynucleotides which hybridize to the complement of the nucleic acid molecules encoding these polypeptides under stringent hybridization conditions, or alternatively, under lower stringency conditions, are also encompassed by the invention, as are polypeptides encoded by these polynucleotides.

[0063] By a nucleic acid having a nucleotide sequence at least, for example, 95% “identical” to a reference nucleotide sequence of the present invention, it is intended that the nucleotide sequence of the nucleic acid is identical to the reference sequence except that the nucleotide sequence may include up to five point mutations per each 100 nucleotides of the reference nucleotide sequence encoding the polypeptide. In other words, to obtain a nucleic acid having a nucleotide sequence at least 95% identical to a reference nucleotide sequence, up to 5% of the nucleotides in the reference sequence may be deleted or substituted with another nucleotide, or a number of nucleotides up to 5% of the total nucleotides in the reference sequence may be inserted into the reference sequence. The query sequence may be, for example, an entire sequence referred to in Table 1, an ORF (open reading frame), or any fragment specified as described herein.

[0064] As a practical matter, whether any particular nucleic acid molecule or polypeptide is at least 80%, 85%, 90%, 95%, 96%, 97%, 98% or 99% identical to a nucleotide sequence of the present invention can be determined conventionally using known computer programs. A preferred method for determining the best overall match between a query sequence (a sequence of the present invention) and a subject sequence, also referred to as a global sequence alignment, can be determined using the FASTDB computer program based on the algorithm of Brutlag et al. (Comp. App. Biosci. 6:237-245 (1990)). In a sequence alignment the query and subject sequences are both DNA sequences. An RNA sequence can be compared by converting U's to T's. The result of said global sequence alignment is in percent identity. Preferred parameters used in a FASTDB alignment of DNA sequences to calculate percent identiy are: Matrix=Unitary, k-tuple=4, Mismatch Penalty=1, Joining Penalty=30, Randomization Group Length=0, Cutoff Score=1, Gap Penalty=5, Gap Size Penalty 0.05, Window Size=500 or the length of the subject nucleotide sequence, whichever is shorter.

[0065] If the subject sequence is shorter than the query sequence because of 5′ or 3′0 deletions, not because of internal deletions, a manual correction must be made to the results. This is because the FASTDB program does not account for 5′ and 3′ truncations of the subject sequence when calculating percent identity. For subject sequences truncated at the 5′ or 3′ ends, relative to the query sequence, the percent identity is corrected by calculating the number of bases of the query sequence that are 5′ and 3′ of the subject sequence, which are not matched/aligned, as a percent of the total bases of the query sequence. Whether a nucleotide is matched/aligned is determined by results of the FASTDB sequence alignment. This percentage is then subtracted from the percent identity, calculated by the above FASTDB program using the specified parameters, to arrive at a final percent identity score. This corrected score is what is used for the purposes of the present invention. Only bases outside the 5′ and 3′ bases of the subject sequence, as displayed by the FASTDB alignment, which are not matched/aligned with the query sequence, are calculated for the purposes of manually adjusting the percent identity score.

[0066] For example, a 90 base subject sequence is aligned to a 100 base query sequence to determine percent identity. The deletions occur at the 5′ end of the subject sequence and therefore, the FASTDB alignment does not show a matched/alignment of the first 10 bases at 5′ end. The 10 unpaired bases represent 10% of the sequence (number of bases at the 5′ and 3′ ends not matched/total number of bases in the query sequence) so 10% is subtracted from the percent identity score calculated by the FASTDB program. If the remaining 90 bases were perfectly matched the final percent identity would be 90%. In another example, a 90 base subject sequence is compared with a 100 base query sequence. This time the deletions are internal deletions so that there are no bases on the 5′ or 3′ of the subject sequence which are not matched/aligned with the query. In this case the percent identity calculated by FASTDB is not manually corrected. Once again, only bases 5′ and 3′ of the subject sequence which are not matched/aligned with the query sequence are manually corrected for. No other manual corrections are to made for the purposes of the present invention.

[0067] By a polypeptide having an amino acid sequence at least, for example, 95% “identical” to a query amino acid sequence of the present invention, it is intended that the amino acid sequence of the subject polypeptide is identical to the query sequence expect that the subject polypeptide sequence may include up to five amino acid alterations per each 100 amino acids of the query amino acid sequence. In other words, to obtain a polypeptide having an amino acid sequence at least 95% identical to a query amino acid sequence, up to 5% of the amino acid residues in the subject sequence may be inserted, deleted, (indels) or substituted with another amino acid. These alterations of the reference sequence may occur at the amino or carboxy terminal positions of the reference amino acid sequence or anywhere between those terminal positions, interspersed either individually among residues in the reference sequence or in one or more contiguous groups within the reference sequence.

[0068] As a practical matter, whether any particular polypeptide is at least 80%, 85%, 90%, 95%, 96%, 97%, 98% or 99% identical to, for instance, the amino acid sequence in SEQ ID NO:Y or a fragment thereof, the amino acid sequence encoded by the nucleotide sequence in SEQ ID NO:X or a fragment thereof, or the amino acid sequence encoded by the cDNA in the related cDNA clone contained in a deposited library, or a fragment thereof, can be determined conventionally using known computer programs. A preferred method for determining the best overall match between a query sequence (a sequence of the present invention) and a subject sequence, also referred to as a global sequence alignment, can be determined using the FASTDB computer program based on the algorithm of Brutlag et al. (Comp. App. Biosci.6:237-245(1990)). In a sequence alignment the query and subject sequences are either both nucleotide sequences or both amino acid sequences. The result of said global sequence alignment is in percent identity. Preferred parameters used in a FASTDB amino acid alignment are: Matrix=PAM 0, k-tuple=2, Mismatch Penalty=1, Joining Penalty=20, Randomization Group Length=0, Cutoff Score=1, Window Size=sequence length, Gap Penalty=5, Gap Size Penalty=0.05, Window Size=500 or the length of the subject amino acid sequence, whichever is shorter.

[0069] If the subject sequence is shorter than the query sequence due to N- or C-terminal deletions, not because of internal deletions, a manual correction must be made to the results. This is because the FASTDB program does not account for N- and C-terminal truncations of the subject sequence when calculating global percent identity. For subject sequences truncated at the N- and C-termini, relative to the query sequence, the percent identity is corrected by calculating the number of residues of the query sequence that are N- and C-terminal of the subject sequence, which are not matched/aligned with a corresponding subject residue, as a percent of the total bases of the query sequence. Whether a residue is matched/aligned is determined by results of the FASTDB sequence alignment. This percentage is then subtracted from the percent identity, calculated by the above FASTDB program using the specified parameters, to arrive at a final percent identity score. This final percent identity score is what is used for the purposes of the present invention. Only residues to the N- and C-termini of the subject sequence, which are not matched/aligned with the query sequence, are considered for the purposes of manually adjusting the percent identity score. That is, only query residue positions outside the farthest N- and C-terminal residues of the subject sequence.

[0070] For example, a 90 amino acid residue subject sequence is aligned with a 100 residue query sequence to determine percent identity. The deletion occurs at the N-terminus of the subject sequence and therefore, the FASTDB alignment does not show a matching/alignment of the first 10 residues at the N-terminus. The 10 unpaired residues represent 10% of the sequence (number of residues at the N- and C-termini not matched/total number of residues in the query sequence) so 10% is subtracted from the percent identity score calculated by the FASTDB program. If the remaining 90 residues were perfectly matched the final percent identity would be 90%. In another example, a 90 residue subject sequence is compared with a 100 residue query sequence. This time the deletions are internal deletions so there are no residues at the N- or C-termini of the subject sequence which are not matched/aligned with the query. In this case the percent identity calculated by FASTDB is not manually corrected. Once again, only residue positions outside the N- and C-terminal ends of the subject sequence, as displayed in the FASTDB alignment, which are not matched/aligned with the query sequence are manually corrected for. No other manual corrections are to made for the purposes of the present invention.

[0071] The variants may contain alterations in the coding regions, non-coding regions, or both. Especially preferred are polynucleotide variants containing alterations which produce silent substitutions, additions, or deletions, but do not alter the properties or activities of the encoded polypeptide. Nucleotide variants produced by silent substitutions due to the degeneracy of the genetic code are preferred. Moreover, variants in which less than 50, less than 40, less than 30, less than 20, less than 10, or 5-50, 5-25, 5-10, 1-5, or 1-2 amino acids are substituted, deleted, or added in any combination are also preferred. Polynucleotide variants can be produced for a variety of reasons, e.g., to optimize codon expression for a particular host (change codons in the human mRNA to those preferred by a bacterial host such as E. coli).

[0072] Naturally occurring variants are called “allelic variants,” and refer to one of several alternate forms of a gene occupying a given locus on a chromosome of an organism. (Genes II. Lewin. B., ed., John Wiley & Sons, New York (1985).) These allelic variants can vary at either the polynucleotide and/or polypeptide level and are included in the present invention. Alternatively, non-naturally occurring variants may be produced by mutagenesis techniques or by direct synthesis.

[0073] Using known methods of protein engineering and recombinant DNA technology, variants may be generated to improve or alter the characteristics of the polypeptides of the present invention. For instance, as discussed herein, one or more amino acids can be deleted from the N-terminus or C-terminus of the polypeptide of the present invention without substantial loss of biological function. The authors of Ron et al., J. Biol. Chem. 268: 2984-2988 (1993), reported variant KGF proteins having heparin binding activity even after deleting 3, 8, or 27 amino-terminal amino acid residues. Similarly, Interferon gamma exhibited up to ten times higher activity after deleting 8-10 amino acid residues from the carboxy terminus of this protein. (Dobeli et al., J. Biotechnology 7:199-216 (1988).)

[0074] Moreover, ample evidence demonstrates that variants often retain a biological activity similar to that of the naturally occurring protein. For example, Gayle and coworkers (J. Biol. Chem 268:22105-22111 (1993)) conducted extensive mutational analysis of human cytokine IL-1a. They used random mutagenesis to generate over 3,500 individual IL-1a mutants that averaged 2.5 amino acid changes per variant over the entire length of the molecule. Multiple mutations were examined at every possible amino acid position. The investigators found that “[m]ost of the molecule could be altered with little effect on either [binding or biological activity].” (See, Abstract.) In fact, only 23 unique amino acid sequences, out of more than 3,500 nucleotide sequences examined, produced a protein that significantly differed in activity from wild-type.

[0075] Furthermore, as discussed herein, even if deleting one or more amino acids from the N-terminus or C-terminus of a polypeptide results in modification or loss of one or more biological functions, other biological activities may still be retained. For example, the ability of a deletion variant to induce and/or to bind antibodies which recognize the secreted form will likely be retained when less than the majority of the residues of the secreted form are removed from the N-terminus or C-terminus. Whether a particular polypeptide lacking N- or C-terminal residues of a protein retains such immunogenic activities can readily be determined by routine methods described herein and otherwise known in the art.

[0076] Thus, the invention further includes polypeptide variants which show a functional activity (e.g., biological activity) of the polypeptide of the invention of which they are a variant. Such variants include deletions, insertions, inversions, repeats, and substitutions selected according to general rules known in the art so as have little effect on activity.

[0077] The present application is directed to nucleic acid molecules at least 80%, 85%, 90%, 95%, 96%, 97%, 98%, 99% or 100% identical to the nucleic acid sequences disclosed herein or fragments thereof, (e.g., including but not limited to fragments encoding a polypeptide having the amino acid sequence of an N and/or C terminal deletion), irrespective of whether they encode a polypeptide having functional activity. This is because even where a particular nucleic acid molecule does not encode a polypeptide having functional activity, one of skill in the art would still know how to use the nucleic acid molecule, for instance, as a hybridization probe or a polymerase chain reaction (PCR) primer. Uses of the nucleic acid molecules of the present invention that do not encode a polypeptide having functional activity include, inter alia, (1) isolating a gene or allelic or splice variants thereof in a cDNA library; (2) in situ hybridization (e.g., “FISH”) to metaphase chromosomal spreads to provide precise chromosomal location of the gene, as described in Verma et al., Human Chromosomes: A Manual of Basic Techniques, Pergamon Press, New York (1988); and (3) Northern Blot analysis for detecting mRNA expression in specific tissues.

[0078] Preferred, however, are nucleic acid molecules having sequences at least 80%, 85%, 90%, 95%, 96%, 97%, 98%, 99% or 100% identical to the nucleic acid sequences disclosed herein, which do, in fact, encode a polypeptide having a functional activity of a polypeptide of the invention.

[0079] Of course, due to the degeneracy of the genetic code, one of ordinary skill in the art will immediately recognize that a large number of the nucleic acid molecules having a sequence at least 80%, 85%, 90%, 95%, 96%, 97%, 98%, 99%, or 100% identical to, for example, the nucleic acid sequence of the cDNA in the related cDNA clone contained in a deposited library, the nucleic acid sequence referred to in Table 1 (SEQ ID NO:X), or fragments thereof, will encode polypeptides “having functional activity.” In fact, since degenerate variants of any of these nucleotide sequences all encode the same polypeptide, in many instances, this will be clear to the skilled artisan even without performing the above described comparison assay. It will be further recognized in the art that, for such nucleic acid molecules that are not degenerate variants, a reasonable number will also encode a polypeptide having functional activity. This is because the skilled artisan is fully aware of amino acid substitutions that are either less likely or not likely to significantly effect protein function (e.g., replacing one aliphatic amino acid with a second aliphatic amino acid), as further described below.

[0080] For example, guidance concerning how to make phenotypically silent amino acid substitutions is provided in Bowie et al., “Deciphering the Message in Protein Sequences: Tolerance to Amino Acid Substitutions,” Science 247:1306-1310 (1990), wherein the authors indicate that there are two main strategies for studying the tolerance of an amino acid sequence to change.

[0081] The first strategy exploits the tolerance of amino acid substitutions by natural selection during the process of evolution. By comparing amino acid sequences in different species, conserved amino acids can be identified. These conserved amino acids are likely important for protein function. In contrast, the amino acid positions where substitutions have been tolerated by natural selection indicates that these positions are not critical for protein function. Thus, positions tolerating amino acid substitution could be modified while still maintaining biological activity of the protein.

[0082] The second strategy uses genetic engineering to introduce amino acid changes at specific positions of a cloned gene to identify regions critical for protein function. For example, site directed mutagenesis or alanine-scanning mutagenesis (introduction of single alanine mutations at every residue in the molecule) can be used. (Cunningham and Wells, Science 244:1081-1085 (1989).) The resulting mutant molecules can then be tested for biological activity.

[0083] As the authors state, these two strategies have revealed that proteins are surprisingly tolerant of amino acid substitutions. The authors further indicate which amino acid changes are likely to be permissive at certain amino acid positions in the protein. For example, most buried (within the tertiary structure of the protein) amino acid residues require nonpolar side chains, whereas few features of surface side chains are generally conserved. Moreover, tolerated conservative amino acid substitutions involve replacement of the aliphatic or hydrophobic amino acids Ala, Val, Leu and Ile; replacement of the hydroxyl residues Ser and Thr; replacement of the acidic residues Asp and Glu; replacement of the amide residues Asn and Gln, replacement of the basic residues Lys, Arg, and His; replacement of the aromatic residues Phe, Tyr, and Trp, and replacement of the small-sized amino acids Ala, Ser, Thr, Met, and Gly. Besides conservative amino acid substitution, variants of the present invention include (i) substitutions with one or more of the non-conserved amino acid residues, where the substituted amino acid residues may or may not be one encoded by the genetic code, or (ii) substitution with one or more of amino acid residues having a substituent group, or (iii) fusion of the mature polypeptide with another compound, such as a compound to increase the stability and/or solubility of the polypeptide (for example, polyethylene glycol), or (iv) fusion of the polypeptide with additional amino acids, such as, for example, an IgG Fc fusion region peptide, or leader or secretory sequence, or a sequence facilitating purification. Such variant polypeptides are deemed to be within the scope of those skilled in the art from the teachings herein.

[0084] For example, polypeptide variants containing amino acid substitutions of charged amino acids with other charged or neutral amino acids may produce proteins with improved characteristics, such as less aggregation. Aggregation of pharmaceutical formulations both reduces activity and increases clearance due to the aggregate's immunogenic activity. (Pinckard et al., Clin. Exp. Immunol. 2:331-340 (1967); Robbins et al., Diabetes 36: 838-845 (1987); Cleland et al., Crit. Rev. Therapeutic Drug Carrier Systems 10:307-377 (1993).)

[0085] A further embodiment of the invention relates to a polypeptide which comprises the amino acid sequence of a polypeptide having an amino acid sequence which contains at least one amino acid substitution, but not more than 50 amino acid substitutions, even more preferably, not more than 40 amino acid substitutions, still more preferably, not more than 30 amino acid substitutions, and still even more preferably, not more than 20 amino acid substitutions. Of course it is highly preferable for a polypeptide to have an amino acid sequence which comprises the amino acid sequence of a polypeptide of SEQ ID NO:Y, an amino acid sequence encoded by SEQ ID NO:X, and/or the amino acid sequence encoded by the cDNA in the related cDNA clone contained in a deposited library which contains, in order of ever-increasing preference, at least one, but not more than 10, 9, 8, 7, 6, 5, 4, 3, 2 or 1 amino acid substitutions. In specific embodiments, the number of additions, substitutions, and/or deletions in the amino acid sequence of SEQ ID NO:Y or fragments thereof (e.g., the mature form and/or other fragments described herein), an amino acid sequence encoded by SEQ ID NO:X or fragments thereof, and/or the amino acid sequence encoded by the cDNA in the related cDNA clone contained in a deposited library or fragments thereof, is 1-5, 5-10, 5-25, 5-50, 10-50 or 50-150, conservative amino acid substitutions are preferable.

[0086] Polynucleotide and Polypeptide Fragments

[0087] The present invention is also directed to polynucleotide fragments of the prostate and prostate cancer polynucleotides (nucleic acids) of the invention. In the present invention, a “polynucleotide fragment” refers, for example, to a polynucleotide having a nucleic acid sequence which: is a portion of the cDNA contained in a deposited cDNA clone; or is a portion of a polynucleotide sequence encoding the polypeptide encoded by the cDNA contained in a deposited cDNA clone; or is a portion of the polynucleotide sequence in SEQ ID NO:X or the complementary strand thereto; or is a polynucleotide sequence encoding a portion of the polypeptide of SEQ ID NO:Y; or is a polynucleotide sequence encoding a portion of a polypeptide encoded by SEQ ID NO:X or the complementary strand thereto. The nucleotide fragments of the invention are preferably at least about 15 nt, and more preferably at least about 20 nt, still more preferably at least about 30 nt, and even more preferably, at least about 40 nt, at least about 50 nt, at least about 75 nt, at least about 100 nt, at least about 125 nt or at least about 150 nt in length. A fragment “at least 20 nt in length,” for example, is intended to include 20 or more contiguous bases from, for example, the sequence contained in the cDNA in a related cDNA clone contained in a deposited library, the nucleotide sequence shown in SEQ ID NO:X or the complementary stand thereto. In this context “about” includes the particularly recited value or a value larger or smaller by several (5, 4, 3, 2, or 1) nucleotides. these nucleotide fragments have used that include, but are not limited to, as diagnostic probes and primers as discussed herein. Of course, larger fragments (e.g., at least 150, 175, 200, 250, 500, 600, 1000, or 2000 nucleotides in length) are also encompassed by the invention.

[0088] Moreover, representative examples of polynucleotide fragments of the invention, include, for example, fragments comprising, or alternatively consisting of, a sequence from about nucleotide number 1-50, 51-100, 101-150, 151-200, 201-250, 251-300, 301-350, 351-400, 401-450, 451-500, 501-550, 551-600, 651-700,701-750, 751-800, 800-850, 851-900, 901-950, 951-1000, 1001-1050, 1051-1100, 1101-1150, 1151-1200, 1201-1250, 1251-1300, 1301-1350, 1351-1400, 1401-1450, 1451-1500, 1501-1550, 1551-1600, 1601-1650, 1651-1700, 1701-1750, 1751-1800, 1801-1850, 1851-1900, 1901-1950, 1951-2000, 2001-2050, 2051-2100, 2101-2150, 2151-2200, 2201-2250, 2251-2300, 2301-2350, 2351-2400, 2401-2450, 2451-2500, 2501-2550, 2551-2600, 2601-2650, 2651-2700, 2701-2750, 2751-2800, 2801-2850, 2851-2900, 2901-2950, 2951-3000, 3001-3050, 3051-3100, 3101-3150, 3151-3200, 3201-3250, 3251-3300, 3301-3350, 3351-3400, 3401-3450, 3451-3500, 3501-3550, and 3551 to the end of SEQ ID NO:X, or the complementary strand thereto. In this context “about” includes the particularly recited range or a range larger or smaller by several (5, 4, 3, 2, or 1) nucleotides, at either terminus or at both termini. Preferably, these fragments encode a polypeptide which has a functional activity (e.g., biological activity) of the polypeptide encoded by the polynucleotide of which the sequence is a portion. More preferably, these fragments can be used as probes or primers as discussed herein. Polynucleotides which hybridize to one or more of these nucleic acid molecules under stringent hybridization conditions or alternatively, under lower stringency conditions, are also encompassed by the invention, as are polypeptides encoded by these polynucleotides or fragments.

[0089] Moreover, representative examples of polynucleotide fragments of the invention, include, for example, fragments comprising, or alternatively consisting of, a sequence from about nucleotide number 1-50, 51-100, 101-150, 151-200, 201-250, 251-300, 301-350, 351-400, 401-450, 451-500, 501-550, 551-600, 651-700,701-750, 751-800, 800-850, 851-900, 901-950, 951-1000, 1001-1050, 1051-1100, 1101-1150, 1151-1200, 1201-1250, 1251-1300, 1301-1350, 1351-1400, 1401-1450, 1451-1500, 1501-1550, 1551-1600, 1601-1650, 1651-1700, 1701-1750, 1751-1800, 1801-1850, 1851-1900, 1901-1950, 1951-2000, 2001-2050, 2051-2100, 2101-2150, 2151-2200, 2201-2250, 2251-2300, 2301-2350, 2351-2400, 2401-2450, 2451-2500, 2501-2550, 2551-2600, 2601-2650, 2651-2700, 2701-2750, 2751-2800, 2801-2850, 2851-2900, 2901-2950, 2951-3000, 3001-3050, 3051-3100, 3101-3150, 3151-3200, 3201-3250, 3251-3300, 3301-3350, 3351-3400, 3401-3450, 3451-3500, 3501-3550, and 3551 to the end of the cDNA nucleotide sequence contained in the deposited cDNA clone, or the complementary strand thereto. In this context “about” includes the particularly recited range, or a range larger or smaller by several (5, 4, 3, 2, or 1) nucleotides, at either terminus or at both termini. Preferably, these fragments encode a polypeptide which has a functional activity (e.g., biological activity) of the polypeptide encoded by the cDNA nucleotide sequence contained in the deposited cDNA clone. More preferably, these fragments can be used as probes or primers as discussed herein. Polynucleotides which hybridize to one or more of these fragments under stringent hybridization conditions or alternatively, under lower stringency conditions, are also encompassed by the invention, as are polypeptides encoded by these polynucleotides or fragments.

[0090] In the present invention, a “polypeptide fragment” refers to an amino acid sequence which is portion of that contained in SEQ ID NO:Y, a portion of an amino acid sequence encoded by the polynucleotide sequence of SEQ ID NO:X and/or encoded by the cDNA contained in the related cDNA clone contained in a deposited library. Protein (polypeptide) fragments may be “free-standing,” or comprised within a larger polypeptide of which the fragment forms a part or region, most preferbly as a single continous region. Representative example of polypeptide fragment of the invention, include, for example, fragments comprising, or alternatively consisting of, an amino acid sequence from about amino acid number 1-20, 21-40, 41-60, 61-80, 81-100, 102-120, 121-140, 141-160, 161-180, 181-200, 201-220, 221-240, 241-260, 261-280, 281-300, 301-320, 321-340, 341-360, 361-380, 381-400, 401-420, 421-440, 441-460, 461-480, 481-500, 501-520, 521-540, 541-560, 561-580, 581-600, 601-620, 621-640, 641-660, 661-680, 681-700, 701-720, 721-740, 741-760, 761-780, 781-800, 801-820, 821-840, 841-860, 861-880, 881-900, 901-920, 921-940, 941-960, 961-980, 981-1000, 1001-1020, 1021-1040, 1041-1060, 1061-1080, 1081-1100, 1101-1120, 1121-1140, 1141-1160, 1161-1180, and 1181 to the end of SEQ ID NO:Y. Moreover, polypeptide fragments of the invention may be at least about 10, 15, 20, 25, 30, 35, 40, 45, 50, 55, 60, 65, 70, 75, 80, 85, 90, 100, 110, 120, 130, 140, or 150 amino acids in length. In this context “about” includes the particularly recited ranges or values, or ranges or values larger or smaller by several (5, 4, 3, 2, or 1) amino acids, at either terminus or at both termini. Polynucleotides encoding these polypeptide fragments are also encompassed by the invention.

[0091] Even if deletion of one or more amino acids from the N-terminus of a protein results in modification of loss of one or more biological functions of the protein, other functional activities (e.g., biological activities, ability to multimerize, ability to bind a ligand) may still be retained. For example, the ability of shortened muteins to induce and/or bind to antibodies which recognize the complete or mature forms of the polypeptides generally will be retained when less than the majority of the residues of the complete or mature polypeptide are removed from the N-terminus. Whether a particular polypeptide lacking N-terminal residues of a complete polypeptide retains such immunologic activities can readily be determined by routine methods described herein and otherwise known in the art. It is not unlikely that a mutein with a large number of deleted N-terminal amino acid residues may retain some biological or immunogenic activities. In fact, peptides composed of as few as six amino acid residues may often evoke an immune response.

[0092] Accordingly, polypeptide fragments of the invention include the secreted protein as well as the mature form. Further preferred polypeptide fragments include the secreted protein or the mature form having a continuous series of deleted residues from the amino or the carboxy terminus, or both. For example, any number of amino acids, ranging from 1-60, can be deleted from the amino terminus of either the secreted polypeptide or the mature form. Similarly, any number of amino acids, ranging from 1-30, can be deleted from the carboxy terminus of the secreted protein or mature form. Furthermore, any combination of the above amino and carboxy terminus deletions are preferred. Similarly, polynucleotides encoding these polypeptide fragments are also preferred.

[0093] The present invention further provides polypeptides having one or more residues deleted from the amino terminus of the amino acid sequence of a polypeptide disclosed herein (e.g., a polypeptide of SEQ ID NO:Y, a polypeptide encoded by the polynucleotide sequence contained in SEQ ID NO:X, and/or a polypeptide encoded by the cDNA contained in the related cDNA clone contained in a deposited library). In particular, N-terminal deletions may be described by the general formula m-q, where q is a whole integer representing the total number of amino acid residues in a polypeptide of the invention (e.g., the polypeptide disclosed in SEQ ID NO:Y), and m is defined as any integer ranging from 2 to q-6. Polynucleotides encoding these polypeptides are also encompassed by the invention.

[0094] Also as mentioned above, even if deletion of one or more amino acids from the C-terminus of a protein results in modification of loss of one or more biological functions of the protein, other functional activities (e.g., biological activities, ability to multimerize, ability to bind a ligand) may still be retained. For example the ability of the shortened mutein to induce and/or bind to antibodies which recognize the complete or mature forms of the polypeptide generally will be retained when less than the majority of the residues of the complete or mature polypeptide are removed from the C-terminus. Whether a particular polypeptide lacking C-terminal residues of a complete polypeptide retains such immunologic activities can readily be determined by routine methods described herein and otherwise known in the art. It is not unlikely that a mutein with a large number of deleted C-terminal amino acid residues may retain some biological or immunogenic activities. In fact, peptides composed of as few as six amino acid residues may often evoke an immune response.

[0095] Accordingly, the present invention further provides polypeptides having one or more residues from the carboxy terminus of the amino acid sequence of a polypeptide disclosed herein (e.g., a polypeptide of SEQ ID NO:Y, a polypeptide encoded by the polynucleotide sequence contained in SEQ ID NO:X, and/or a polypeptide encoded by the cDNA contained in deposited cDNA clone referenced in Table 1). In particular, C-terminal deletions may be described by the general formula 1-n, where n is any whole integer ranging from 6 to q-1, and where n corresponds to the position of an amino acid residue in a polypeptide of the invention. Polynucleotides encoding these polypeptides are also encompassed by the invention.

[0096] In addition, any of the above described N- or C-terminal deletions can be combined to produce a N- and C-terminal deleted polypeptide. The invention also provides polypeptides having one or more amino acids deleted from both the amino and the carboxyl termini, which may be described generally as having residues m-n of a polypeptide encoded by SEQ ID NO:X (e.g., including, but not limited to, the preferred polypeptide disclosed as SEQ ID NO:Y), and/or the cDNA in the related cDNA clone contained in a deposited library, where n and m are integers as described above. Polynucleotides encoding these polypeptides are also encompassed by the invention.

[0097] Any polypeptide sequence contained in the polypeptide of SEQ ID NO:Y, encoded by the polynucleotide sequences set forth as SEQ ID NO:X, or encoded by the cDNA in the related cDNA clone contained in a deposited library may be analyzed to determine certain preferred regions of the polypeptide. For example, the amino acid sequence of a polypeptide encoded by a polynucleotide sequence of SEQ ID NO:X, or the cDNA in a deposited cDNA clone may be analyzed using the default parameters of the DNASTAR computer algorithm (DNASTAR, Inc., 1228 S. Park St., Madison, Wis. 53715 USA; http://www.dnastar.com/).

[0098] Polypeptide regions that may be routinely obtained using the DNASTAR computer algorithm include, but are not limited to, Garnier-Robson alpha-regions, beta-regions, turn-regions, and coil-regions, Chou-Fasman alpha-regions, beta-regions, and turn-regions, Kyte-Doolittle hydrophilic regions and hydrophobic regions, Eisenberg alpha- and beta-amphipathic regions, Karplus-Schulz flexible regions, Emini surface-forming regions and Jameson-Wolf regions of high antigenic index. Among highly preferred polynucleotides of the invention in this regard are those that encode polypeptides comprising regions that combine several structural features, such as several (e.g., 1, 2, 3 or 4) of the features set out above.

[0099] Additionally, Kyte-Doolittle hydrophilic regions and hydrophobic regions, Emini surface-forming regions, and Jameson-Wolf regions of high antigenic index (i.e., containing four or more contiguous amino acids having an antigenic index of greater than or equal to 1.5, as identified using the default parameters of the Jameson-Wolf program) can routinely be used to determine polypeptide regions that exhibit a high degree of potential for antigenicity. Regions of high antigenicity are determined from data by DNASTAR analysis by choosing values which represent regions of the polypeptide which are likely to be exposed on the surface of the polypeptide in an environment in which antigen recognition may occur in the process of initiation of an immune response.

[0100] Preferred polypeptide fragments of the invention are fragments comprising, or alternatively consisting of, an amino acid sequence that displays a functional activity of the polypeptide sequence of which the amino acid sequence is a fragment.

[0101] By a polypeptide demonstrating a “functional activity” is meant, a polypeptide capable of displaying one or more known functional activities associated with a full-length (complete) protein of the invention. Such functional activities include, but are not limited to, biological activity, antigenicity [ability to bind (or compete with a polypeptide for binding) to an anti-polypeptide antibody], immunogenicity (ability to generate antibody which binds to a specific polypeptide of the invention), ability to form multimers with polypeptides of the invention, and ability to bind to a receptor or ligand for a polypeptide.

[0102] Other preferred polypeptide fragments are biologically active fragments. Biologically active fragments are those exhibiting activity similar, but not necessarily identical, to an activity of the polypeptide of the present invention. The biological activity of the fragments may include an improved desired activity, or a decreased undesirable activity.

[0103] In preferred embodiments, polypeptides of the invention comprise, or alternatively consist of, one, two, three, four, five or more of the antigenic fragments of the polypeptide of SEQ ID NO:Y, or portions thereof. Polynucleotides encoding these polypeptides are also encompassed by the invention.

TABLE 4

| Sequence/ | |
|---|---|
| Contig ID | Epitopes |
| 574130 | Preferred epitopes include those comprising a sequence shown in SEQ ID NO. 941 as |
| | residues: Ala-10 to Asp-18, Asp-20 to Cys-27, Cys-44 to Gly-52, Pro-57 to Ser-62, Pro-65 |
| | to His-72, Gln-88 to Asn-94, Pro-118 to Thr-127, Pro-129 to Thr-143, Tyr-156 to Tyr-165, |
| | Pro-167 to Leu-172, Cys-180 to Asp-185. |
| 637706 | Preferred epitopes include those comprising a sequence shown in SEQ ID NO. 942 as |
| | residues: Arg-1 to Glu-6, Lys-11 to Val-24, Pro-27 to Gln-36, Glu-49 to Gly-54, His-59 to |
| | Gly-73, Thr-86 to Ala-97, Pro-104 to Gly-113, Asp-137 to Asp-160, Arg-177 to Asn-195, |
| | Leu-203 to Asn-212, Asn-219 to Thr-231, Lys-238 to Tyr-247, Glu-249 to Asn-254, Met- |
| | 269 to Asp-303, Ser-328 to Ser-336. |
| 684310 | Preferred epitopes include those comprising a sequence shown in SEQ ID NO. 944 as |
| | residues: Ala-13 to Arg-20, Glu-25 to Arg-40. |
| 731016 | Preferred epitopes include those comprising a sequence shown in SEQ ID NO. 945 as |
| | residues: Gly-13 to Leu-20, Gly-40 to Ala-45. |
| 827771 | Preferred epitopes include those comprising a sequence shown in SEQ ID NO. 946 as |
| | residues: Ala-11 to Glu-16. |
| 828193 | Preferred epitopes include those comprising a sequence shown in SEQ ID NO. 947 as |
| | residues: Gly-1 to Gly-9, Ala-15 to Ala-21. |
| 828194 | Preferred epitopes include those comprising a sequence shown in SEQ ID NO. 948 as |
| | residues: Pro-45 to Trp-53. |
| 828199 | Preferred epitopes include those comprising a sequence shown in SEQ ID NO. 949 as |
| | residues: Gly-38 to Ser-44, Leu-123 to Trp-138, His-149 to Pro-154. |
| 828221 | Preferred epitopes include those comprising a sequence shown in SEQ ID NO. 950 as |
| | residues: Lys-32 to Leu-41, Arg-119 to Tyr-124, Pro-197 to Arg-204, Asp-236 to Lys-242, |
| | Ala-290 to Tyr-296, Thr-320 to Arg-331, Asp-337 to Val-343, His-358 to Gly-368, Thr-419 |
| | to Gln-424. |
| 828235 | Preferred epitopes include those comprising a sequence shown in SEQ ID NO. 951 as |
| | residues: Pro-74 to Arg-82. |
| 828236 | Preferred epitopes include those comprising a sequence shown in SEQ ID NO. 952 as |
| | residues: Lys-10 to Gly-15, Pro-22 to Ser-27, Lys-38 to Glu-63, Lys-74 to Val-87, Met-89 |
| | to Glu-123, Lys-130 to Glu-196, Val-201 to Ala-207, Arg-251 to Lys-256, Glu-271 to Arg- |
| | 279, Pro-317 to Asn-327, Lys-382 to Gln-390, Tyr-409 to Glu-415. |
| 828237 | Preferred epitopes include those comprising a sequence shown in SEQ ID NO. 953 as |
| | residues: Ala-6 to Arg-20, Glu-33 to Lys-40, Gln-45 to Leu-50, Arg-52 to Gln-72, Leu-78 |
| | to Gln-94, Gln-105 to Gln-114. |
| 828242 | Preferred epitopes include those comprising a sequence shown in SEQ ID NO. 955 as |
| | residues: Thr-1 to Trp-9, Pro-26 to Ala-32, Gly-58 to Arg-68, Gln-73 to Thr-99, Ala-191 to |
| | Asp-196, Glu-225 to Glu-234. |
| 828248 | Preferred epitopes include those comprising a sequence shown in SEQ ID NO. 957 as |
| | residues: Lys-21 to Glu-27, Thr-84 to Asp-89, His-103 to Val-109. |
| 828250 | Preferred epitopes include those comprising a sequence shown in SEQ ID NO. 958 as |
| | residues: Glu-106 to Ser-111. |
| 828256 | Preferred epitopes include those comprising a sequence shown in SEQ ID NO. 959 as |
| | residues: Gly-44 to Trp-49, Pro-90 to Ser-95, Tyr-133 to Lys-142, Trp-223 to Gly-242. |
| 828267 | Preferred epitopes include those comprising a sequence shown in SEQ ID NO. 960 as |
| | residues: Pro-1 to His-11, Arg-36 to Gly-52, Arg-62 to Gly-73, Gly-85 to Leu-96, Pro-112 |
| | to Gly-117, Ser-130 to Gly-138. |
| 828272 | Preferred epitopes include those comprising a sequence shown in SEQ ID NO. 962 as |
| | residues: Glu-1 to Gly-13, Ser-58 to Phe-65, Thr-118 to Gly-131, Gly-139 to Arg-157. |
| 828273 | Preferred epitopes include those comprising a sequence shown in SEQ ID NO. 963 as |
| | residues: Ser-1 to Pro-6, Gln-38 to Arg-43. |
| 828290 | Preferred epitopes include those comprising a sequence shown in SEQ ID NO. 964 as |
| | residues: Trp-61 to Cys-67. |
| 828326 | Preferred epitopes include those comprising a sequence shown in SEQ ID NO. 965 as |
| | residues: Arg-2 to Gln-11, Ala-17 to Ser-24, Arg-45 to Arg-58, Pro-60 to Gly-67, Ser-86 to |
| | Thr-92, Asn-143 to Leu-158. |
| 828397 | Preferred epitopes include those comprising a sequence shown in SEQ ID NO. 966 as |
| | residues: Arg-18 to Arg-33. |
| 828405 | Preferred epitopes include those comprising a sequence shown in SEQ ID NO. 967 as |
| | residues: Ser-50 to Leu-57, Ser-88 to Ser-99, Glu-104 to Val-112, Glu-122 to Val-127, Ile- |
| | 152 to Asp-157. |
| 828461 | Preferred epitopes include those comprising a sequence shown in SEQ ID NO. 968 as |
| | residues: Ala-3 to Ala-16, Leu-25 to Pro-44, Ser-82 to Leu-88, Pro-91 to Arg-99, Pro-110 to |
| | Glu-118, Ile-120 to Lys-136, Cys-142 to Leu-149, Glu-156 to Leu-167, Arg-169 to Arg-180, |
| | Gly-197 to Pro-212, Arg-269 to Leu-283. |
| 828482 | Preferred epitopes include those comprising a sequence shown in SEQ ID NO. 969 as |
| | residues: Glu-1 to Ser-7. |
| 828491 | Preferred epitopes include those comprising a sequence shown in SEQ ID NO. 971 as |
| | residues: Arg-42 to Asn-48. |
| 828492 | Preferred epitopes include those comprising a sequence shown in SEQ ID NO. 972 as |
| | residues: Pro-28 to Lys-33, Arg-41 to Glu-47. |
| 828494 | Preferred epitopes include those comprising a sequence shown in SEQ ID NO. 973 as |
| | residues: Phe-24 to Val-32, Arg-49 to Val-55, Tyr-59 to Glu-68, Leu-72 to Asn-80. |
| 828496 | Preferred epitopes include those comprising a sequence shown in SEQ ID NO. 974 as |
| | residues: Gly-1 to Arg-8, Ser-17 to Arg-22, Arg-41 to Leu-47, Lys-49 to Lys-57, Leu-66 to |
| | Arg-73, Glu-94 to Thr-104, Arg-117 to Leu-126, Lys-184 to Asn-193, Glu-197 to Arg-216. |
| 828498 | Preferred epitopes include those comprising a sequence shown in SEQ ID NO. 975 as |
| | residues: Glu-62 to Leu-68, Ile-104 to Ser-111. |
| 828504 | Preferred epitopes include those comprising a sequence shown in SEQ ID NO. 976 as |
| | residues: Ser-14 to Pro-21. |
| 828512 | Preferred epitopes include those comprising a sequence shown in SEQ ID NO. 978 as |
| | residues: Asn-26 to Gln-36, Val-48 to Asp-62, Lys-112 to Ser-123, Val-127 to Phe-132, |
| | Phe-139 to Asp-151, Val-158 to Glu-180. |
| 828516 | Preferred epitopes include those comprising a sequence shown in SEQ ID NO. 979 as |
| | residues: Gly-14 to Gly-20, Ala-22 to Ala-33, Arg-83 to Thr-88, Arg-100 to Leu-105, Lys- |
| | 130 to Lys-141. |
| 828519 | Preferred epitopes include those comprising a sequence shown in SEQ ID NO. 980 as |
| | residues: Gly-7 to Pro-11, His-20 to Ala-25. |
| 828521 | Preferred epitopes include those comprising a sequence shown in SEQ ID NO. 981 as |
| | residues: Asn-13 to His-19, Ser-37 to Arg-45. |
| 828522 | Preferred epitopes include those comprising a sequence shown in SEQ ID NO. 982 as |
| | residues: Lys-12 to Glu-19, Glu-38 to Gly-43, Pro-82 to Lys-93. |
| 828525 | Preferred epitopes include those comprising a sequence shown in SEQ ID NO. 983 as |
| | residues: Pro-23 to Pro-30, Ala-59 to Ser-64, Pro-84 to Thr-93, Pro-135 to Gly-140. |
| 828529 | Preferred epitopes include those comprising a sequence shown in SEQ ID NO. 984 as |
| | residues: Ser-15 to Gln-20, Gln-92 to Phe-113, Thr-141 to Gly-146, Val-153 to Thr-158. |
| 828530 | Preferred epitopes include those comprising a sequence shown in SEQ ID NO. 985 as |
| | residues: Pro-5 to Gln-15, Lys-23 to Leu-32. |
| 828536 | Preferred epitopes include those comprising a sequence shown in SEQ ID NO. 986 as |
| | residues: His-28 to Glu-34. |
| 828537 | Preferred epitopes include those comprising a sequence shown in SEQ ID NO. 987 as |
| | residues: Ile-28 to Leu-33, Gln-42 to Ser-52, Ser-54 to Trp-59. |
| 828539 | Preferred epitopes include those comprising a sequence shown in SEQ ID NO. 988 as |
| | residues: Ala-1 to Leu-9, Ser-19 to Thr-31. |
| 828540 | Preferred epitopes include those comprising a sequence shown in SEQ ID NO. 989 as |
| | residues: Arg-1 to Lys-12, Gly-17 to Ile-23. |
| 828543 | Preferred epitopes include those comprising a sequence shown in SEQ ID NO. 991 as |
| | residues: Ala-13 to Gln-20, Asp-33 to Asn-39. |
| 828544 | Preferred epitopes include those comprising a sequence shown in SEQ ID NO. 992 as |
| | residues: Val-15 to Asp-21. |
| 828551 | Preferred epitopes include those comprising a sequence shown in SEQ ID NO. 995 as |
| | residues: Met-12 to Pro-17. |
| 828560 | Preferred epitopes include those comprising a sequence shown in SEQ ID NO. 998 as |
| | residues: Val-8 to Arg-17. |
| 828561 | Preferred epitopes include those comprising a sequence shown in SEQ ID NO. 999 as |
| | residues: Asn-7 to Gly-20, Thr-32 to Tyr-37, Arg-57 to Gly-66. |
| 828565 | Preferred epitopes include those comprising a sequence shown in SEQ ID NO. 1000 as |
| | residues: Arg-1 to Asn-18. |
| 828566 | Preferred epitopes include those comprising a sequence shown in SEQ ID NO. 1001 as |
| | residues: Arg-41 to His-50, Lys-52 to Thr-60. |
| 828567 | Preferred epitopes include those comprising a sequence shown in SEQ ID NO. 1002 as |
| | residues: Gln-7 to Cys-12, Pro-20 to Lys-30. |
| 828568 | Preferred epitopes include those comprising a sequence shown in SEQ ID NO. 1003 as |
| | residues: Pro-10 to Glu-20, Asn-29 to Trp-37, Ala-44 to Arg-51, Gln-69 to Gly-79. |
| 828570 | Preferred epitopes include those comprising a sequence shown in SEQ ID NO. 1005 as |
| | residues: Ser-16 to Leu-24. |
| 828571 | Preferred epitopes include those comprising a sequence shown in SEQ ID NO. 1006 as |
| | residues: Leu-1 to Gln-17. |
| 828574 | Preferred epitopes include those comprising a sequence shown in SEQ ID NO. 1007 as |
| | residues: Pro-117 to Lys-134, Gln-136 to Trp-143. |
| 828575 | Preferred epitopes include those comprising a sequence shown in SEQ ID NO. 1008 as |
| | residues: Lys-6 to Ala-13. |
| 828578 | Preferred epitopes include those comprising a sequence shown in SEQ ID NO. 1010 as |
| | residues: Gly-72 to Asp-81, Cys-89 to Gly-100, Lys-107 to Arg-114, Lys-119 to Gln-126, |
| | Arg-140 to Ser-160. |
| 828580 | Preferred epitopes include those comprising a sequence shown in SEQ ID NO. 1011 as |
| | residues: Pro-1 to Ala-7, Lys-54 to Gln-68, Leu-81 to Gln-93. |
| 828581 | Preferred epitopes include those comprising a sequence shown in SEQ ID NO. 1012 as |
| | residues: Glu-13 to Ser-21, Glu-31 to Glu-37, Lys-53 to Ala-60. |
| 828583 | Preferred epitopes include those comprising a sequence shown in SEQ ID NO. 1013 as |
| | residues: Gln-1 to Gly-7, Thr-22 to Gly-31. |
| 828585 | Preferred epitopes include those comprising a sequence shown in SEQ ID NO. 1014 as |
| | residues: Leu-28 to His-34. |
| 828587 | Preferred epitopes include those comprising a sequence shown in SEQ ID NO. 1015 as |
| | residues: Gln-1 to Lys-8, Ser-25 to Phe-38, Thr-79 to Val-90, Arg-118 to Glu-125. |
| 828592 | Preferred epitopes include those comprising a sequence shown in SEQ ID NO. 1017 as |
| | residues: Gln-12 to Gln-17, Arg-43 to Gln-49, Lys-62 to Lys-67, Glu-78 to Gly-83. |
| 828594 | Preferred epitopes include those comprising a sequence shown in SEQ ID NO. 1019 as |
| | residues: Glu-9 to Gln-18. |
| 828596 | Preferred epitopes include those comprising a sequence shown in SEQ ID NO. 1020 as |
| | residues: Thr-1 to His-8. |
| 828597 | Preferred epitopes include those comprising a sequence shown in SEQ ID NO. 1021 as |
| | residues: Gln-12 to Trp-17, Asp-83 to Ile-97, Gln-99 to Asp-104, Thr-210 to Ser-216, Arg- |
| | 279 to Thr-296. |
| 828598 | Preferred epitopes include those comprising a sequence shown in SEQ ID NO. 1022 as |
| | residues: Thr-1 to Ser-7. |
| 828601 | Preferred epitopes include those comprising a sequence shown in SEQ ID NO. 1023 as |
| | residues: Ile-1 to Trp-10, Thr-32 to Ser-38, Pro-49 to Gly-56, Ser-78 to Arg-83, Phe-113 to |
| | Arg-122, Leu-156 to Asp-173. |
| 828605 | Preferred epitopes include those comprising a sequence shown in SEQ ID NO. 1024 as |
| | residues: Arg-6 to Pro-12. |
| 828608 | Preferred epitopes include those comprising a sequence shown in SEQ ID NO. 1025 as |
| | residues: Arg-52 to Ile-59, Asp-65 to Phe-76, Lys-96 to Leu-102. |
| 828609 | Preferred epitopes include those comprising a sequence shown in SEQ ID NO. 1026 as |
| | residues: Gly-29 to Gly-36, Lys-105 to Thr-112, Phe-134 to Asn-145, Pro-182 to Gly-190. |
| 828610 | Preferred epitopes include those comprising a sequence shown in SEQ ID NO. 1027 as |
| | residues: Pro-49 to Asp-58, Lys-60 to Ile-66, Ser-68 to Glu-76, Val-95 to Asn-101, Lys-118 |
| | to Thr-124. |
| 828617 | Preferred epitopes include those comprising a sequence shown in SEQ ID NO. 1028 as |
| | residues: Ser-14 to Arg-22, Leu-24 to Cys-30, Pro-35 to GLy-40. |
| 828620 | Preferred epitopes include those comprising a sequence shown in SEQ ID NO. 1029 as |
| | residues: Leu-2 to Arg-10, Ala-57 to Lys-64, Lys-81 to Leu-88, Tyr-160 to Pro-169, Met- |
| | 203 to Asp-216. |
| 828623 | Preferred epitopes include those comprising a sequence shown in SEQ ID NO. 1032 as |
| | residues: His-38 to His-44. |
| 828625 | Preferred epitopes include those comprising a sequence shown in SEQ ID NO. 1033 as |
| | residues: Ile-19 to Asn-28. |
| 828635 | Preferred epitopes include those comprising a sequence shown in SEQ ID NO. 1035 as |
| | residues: Arg-3 to Arg-10. |
| 828637 | Preferred epitopes include those comprising a sequence shown in SEQ ID NO. 1036 as |
| | residues: Asp-9 to Cys-15. |
| 828639 | Preferred epitopes include those comprising a sequence shown in SEQ ID NO. 1037 as |
| | residues: Pro-13 to His-20. |
| 828645 | Preferred epitopes include those comprising a sequence shown in SEQ ID NO. 1038 as |
| | residues: Glu-1 to Gly-10, Lys-18 to Arg-41, Ala-55 to Pro-65. |
| 828648 | Preferred epitopes include those comprising a sequence shown in SEQ ID NO. 1039 as |
| | residues: Ala-12 to Asn-20, Pro-23 to Asn-28, Phe-47 to Val-52, Lys-88 to Gly-93, Tyr-113 |
| | to Asn-123. |
| 828649 | Preferred epitopes include those comprising a sequence shown in SEQ ID NO. 1040 as |
| | residues: Pro-14 to Gln-29. |
| 828651 | Preferred epitopes include those comprising a sequence shown in SEQ ID NO. 1041 as |
| | residues: Gly-2 to Lys-13. |
| 828655 | Preferred epitopes include those comprising a sequence shown in SEQ ID NO. 1043 as |
| | residues: Val-13 to Trp-27. |
| 828657 | Preferred epitopes include those comprising a sequence shown in SEQ ID NO. 1044 as |
| | residues: Glu-20 to Leu-30, Glu-79 to Gly-84, Asp-89 to Trp-96. |
| 828660 | Preferred epitopes include those comprising a sequence shown in SEQ ID NO. 1045 as |
| | residues: Pro-37 to Thr-43. |
| 828663 | Preferred epitopes include those comprising a sequence shown in SEQ ID NO. 1046 as |
| | residues: Ala-19 to Gly-24. |
| 828666 | Preferred epitopes include those comprising a sequence shown in SEQ ID NO. 1047 as |
| | residues: His-54 to Gly-59. |
| 828668 | Preferred epitopes include those comprising a sequence shown in SEQ ID NO. 1048 as |
| | residues: Pro-1 to Gly-12, Pro-30 to Leu-48. |
| 828669 | Preferred epitopes include those comprising a sequence shown in SEQ ID NO. 1049 as |
| | residues: Pro-2 to Ser-7, Trp-27 to Lys-38. |
| 828671 | Preferred epitopes include those comprising a sequence shown in SEQ ID NO. 1051 as |
| | residues: Asp-89 to Ile-94. |
| 828672 | Preferred epitopes include those comprising a sequence shown in SEQ ID NO. 1052 as |
| | residues: Lys-16 to Ser-23. |
| 828675 | Preferred epitopes include those comprising a sequence shown in SEQ ID NO. 1053 as |
| | residues: Lys-11 to His-16, Ala-26 to Ser-65. |
| 828677 | Preferred epitopes include those comprising a sequence shown in SEQ ID NO. 1054 as |
| | residues: Pro-7 to Trp-13. |
| 828678 | Preferred epitopes include those comprising a sequence shown in SEQ ID NO. 1055 as |
| | residues: Glu-188 to Arg-196. |
| 828679 | Preferred epitopes include those comprising a sequence shown in SEQ ID NO. 1056 as |
| | residues: Asn-17 to Lys-23. |
| 828680 | Preferred epitopes include those comprising a sequence shown in SEQ ID NO. 1057 as |
| | residues: Pro-7 to Glu-17, Ser-68 to Tyr-85, Ser-94 to Asn-101, Thr-122 to Arg-129, Ser |
| | 169 to Val-174. |
| 828681 | Preferred epitopes include those comprising a sequence shown in SEQ ID NO. 1058 as |
| | residues: Asp-1 to Asp-19, Arg-27 to Leu-33. |
| 828682 | Preferred epitopes include those comprising a sequence shown in SEQ ID NO. 1059 as |
| | residues: Pro-34 to Glu-39, Ala-41 to Gly-47, Glu-100 to Ser-111. |
| 828683 | Preferred epitopes include those comprising a sequence shown in SEQ ID NO. 1060 as |
| | residues: Gly-7 to Val-14. |
| 828686 | Preferred epitopes include those comprising a sequence shown in SEQ ID NO. 1061 as |
| | residues: Pro-15 to Glu-20, Gln-71 to Leu-84, Glu-86 to Ser-96, Glu-116 to Pro-121, Val- |
| | 176 to Leu-196, Asn-216 to Ala-224. |
| 828687 | Preferred epitopes include those comprising a sequence shown in SEQ ID NO. 1062 as |
| | residues: Glu-3 to Ala-13, Ile-22 to Ser-28. |
| 828688 | Preferred epitopes include those comprising a sequence shown in SEQ ID NO. 1063 as |
| | residues: Asp-7 to Ala-15, Pro-34 to Ile-60, Gln-110 to Asn-117. |
| 828689 | Preferred epitopes include those comprising a sequence shown in SEQ ID NO. 1064 as |
| | residues: Ser-74 to Met-96, Leu-108 to Trp-117, Gly-126 to Gly-131, Glu-161 to Asp-178, |
| | Lys-181 to Tyr-191, Arg-196 to Ser-202. |
| 828692 | Preferred epitopes include those comprising a sequence shown in SEQ ID NO. 1065 as |
| | residues: Pro-73 to Thr-86, Ser-93 to Val-102, Ala-157 to Lys-162, Thr-169 to Lys-184, |
| | Asp-198 to Tyr-211. |
| 828694 | Preferred epitopes include those comprising a sequence shown in SEQ ID NO. 1067 as |
| | residues: Thr-1 to Ala-10, Pro-18 to Arg-25, Ala-49 to Leu-56, Ser-104 to Arg-111. |
| 828696 | Preferred epitopes include those comprising a sequence shown in SEQ ID NO. 1068 as |
| | residues: Ser-5 to Ser-10. |
| 828699 | Preferred epitopes include those comprising a sequence shown in SEQ ID NO. 1070 as |
| | residues: Asp-7 to Val-17, Ala-21 to Ser-26. |
| 828702 | Preferred epitopes include those comprising a sequence shown in SEQ ID NO. 1071 as |
| | residues: Val-14 to Gly-26, Ser-76 to His-87, Ile-127 to Phe-134, Pro-151 to Asn-157. |
| 828703 | Preferred epitopes include those comprising a sequence shown in SEQ ID NO. 1072 as |
| | residues: Cys-58 to Ser-66. |
| 828704 | Preferred epitopes include those comprising a sequence shown in SEQ ID NO. 1073 as |
| | residues: Thr-35 to Thr-42. |
| 828706 | Preferred epitopes include those comprising a sequence shown in SEQ ID NO. 1074 as |
| | residues: Arg-1 to Glu-13. |
| 828708 | Preferred epitopes include those comprising a sequence shown in SEQ ID NO. 1075 as |
| | residues: Asn-17 to Pro-27, Ser-46 to His-51, Leu-53 to Asp-60, Cys-62 to Ile-68. |
| 828711 | Preferred epitopes include those comprising a sequence shown in SEQ ID NO. 1076 as |
| | residues: Asp-24 to Phe-31. |
| 828712 | Preferred epitopes include those comprising a sequence shown in SEQ ID NO. 1077 as |
| | residues: Ser-44 to Lys-49, Glu-65 to Lys-76. |
| 828713 | Preferred epitopes include those comprising a sequence shown in SEQ ID NO. 1078 as |
| | residues: Pro-1 to Asp-6, Arg-13 to Gly-26. |
| 828714 | Preferred epitopes include those comprising a sequence shown in SEQ ID NO. 1079 as |
| | residues: Pro-24 to Glu-42, Gln-58 to Asp-64, Gln-80 to His-90, Pro-92 to Asp-103, Tyr- |
| | 139 to Glu-153, Asp-162 to Asp-180, Glu-189 to Phe-200, Ser-203 to Gln-213, Glu-219 to |
| | Gly-224, Lys-227 to Ser-236, Pro-241 to Asn-260, Phe-275 to Ser-281, Phe-305 to Asn-314, |
| | Gln-319 to Tyr-329, Thr-341 to Ser-357, Pro-360 to Cys-365, Trp-384 to Phe-398, Gln-401 |
| | to Lys-410. |
| 828718 | Preferred epitopes include those comprising a sequence shown in SEQ ID NO. 1081 as |
| | residues: Asp-70 to Leu-85, Ser-195 to Arg-205, Arg-262 to Ala-268, Asn-270 to Ala-277. |
| 828728 | Preferred epitopes include those comprising a sequence shown in SEQ ID NO. 1084 as |
| | residues: Gly-12 to Val-19, Asp-38 to Gln-55, Gln-84 to Tyr-91, Gln-96 to Asp-102. |
| 828730 | Preferred epitopes include those comprising a sequence shown in SEQ ID NO. 1085 as |
| | residues: Gly-142 to Arg-148, Ser-173 to Gln-178, Thr-202 to Ile-207, Leu-276 to Val-282, |
| | Pro-321 to Gly-353, Thr-355 to Glu-364, Glu-380 to Lys-385. |
| 828732 | Preferred epitopes include those comprising a sequence shown in SEQ ID NO. 1086 as |
| | residues: Leu-8 to Lys-29, Leu-79 to Glu-86, Asn-106 to Trp-113. |
| 828733 | Preferred epitopes include those comprising a sequence shown in SEQ ID NO. 1087 as |
| | residues: Lys-26 to Lys-33. |
| 828735 | Preferred epitopes include those comprising a sequence shown in SEQ ID NO. 1088 as |
| | residues: Ser-10 to Pro-21, Ser-94 to Ala-111, Ala-125 to Met-142, Pro-144 to Gln-150, |
| | Asp-194 to Asn-201, Val-216 to Arg-243. |
| 828740 | Preferred epitopes include those comprising a sequence shown in SEQ ID NO. 1091 as |
| | residues: Asn-12 to Leu-21, Leu-23 to Ser-28. |
| 828742 | Preferred epitopes include those comprising a sequence shown in SEQ ID NO. 1092 as |
| | residues: Ser-149 to Leu-158. |
| 828748 | Preferred epitopes include those comprising a sequence shown in SEQ ID NO. 1093 as |
| | residues: Pro-21 to Lys-31, Glu-46 to Thr-52, Cys-93 to Trp-100, Glu-144 to Gln-150, Gln- |
| | 171 to Ser-180, Pro-205 to Trp-210, Ser-222 to Cys-228. |
| 828752 | Preferred epitopes include those comprising a sequence shown in SEQ ID NO. 1095 as |
| | residues: Pro-23 to Gly-28, Ser-34 to Gly-39, Leu-44 to Arg-56, Gln-101 to Leu-112, Leu- |
| | 119 to Ser-124, Lys-129 to Trp-138. |
| 828753 | Preferred epitopes include those comprising a sequence shown in SEQ ID NO. 1096 as |
| | residues: Ile-1 to Gly-44. |
| 828754 | Preferred epitopes include those comprising a sequence shown in SEQ ID NO. 1097 as |
| | residues: Leu-21 to Gln-27. |
| 828757 | Preferred epitopes include those comprising a sequence shown in SEQ ID NO. 1098 as |
| | residues: Thr-27 to Arg-34, Tyr-40 to Trp-47, Thr-83 to Ser-90. |
| 828761 | Preferred epitopes include those comprising a sequence shown in SEQ ID NO. 1099 as |
| | residues: Arg-1 to Gln-19. |
| 828762 | Preferred epitopes include those comprising a sequence shown in SEQ ID NO. 1100 as |
| | residues: Phe-1 to Arg-11, Leu-48 to Lys-56. |
| 828764 | Preferred epitopes include those comprising a sequence shown in SEQ ID NO. 1101 as |
| | residues: Asp-79 to Arg-84. |
| 828765 | Preferred epitopes include those comprising a sequence shown in SEQ ID NO. 1102 as |
| | residues: Ala-5 to Ala-10. |
| 828766 | Preferred epitopes include those comprising a sequence shown in SEQ ID NO. 1103 as |
| | residues: Gly-1 to Lys-10, Glu-21 to Leu-27, Ser-38 to Leu-43. |
| 828768 | Preferred epitopes include those comprising a sequence shown in SEQ ID NO. 1105 as |
| | residues: Lys-39 to Lys-64. |
| 828770 | Preferred epitopes include those comprising a sequence shown in SEQ ID NO. 1106 as |
| | residues: Ser-3 to Tyr-9. |
| 828771 | Preferred epitopes include those comprising a sequence shown in SEQ ID NO. 1107 as |
| | residues: Ser-13 to Cys-21. |
| 828772 | Preferred epitopes include those comprising a sequence shown in SEQ ID NO. 1108 as |
| | residues: Arg-28 to Asp-34. |
| 828776 | Preferred epitopes include those comprising a sequence shown in SEQ ID NO. 1111 as |
| | residues: Pro-6 to Thr-13. |
| 828784 | Preferred epitopes include those comprising a sequence shown in SEQ ID NO. 1118 as |
| | residues: Glu-6 to Leu-21, Ala-34 to Ala-40. |
| 828785 | Preferred epitopes include those comprising a sequence shown in SEQ ID NO. 1119 as |
| | residues: Arg-53 to Ser-64. |
| 828786 | Preferred epitopes include those comprising a sequence shown in SEQ ID NO. 1120 as |
| | residues: Thr-1 to Thr-16, Ser-32 to Lys-39. |
| 828790 | Preferred epitopes include those comprising a sequence shown in SEQ ID NO. 1122 as |
| | residues: Pro-13 to Ala-21. |
| 828791 | Preferred epitopes include those comprising a sequence shown in SEQ ID NO. 1123 as |
| | residues: Lys-1 to Cys-6. |
| 828792 | Preferred epitopes include those comprising a sequence shown in SEQ ID NO. 1124 as |
| | residues: Arg-1 to Thr-7, Gln-12 to Gly-17. |
| 828799 | Preferred epitopes include those comprising a sequence shown in SEQ ID NO. 1128 as |
| | residues: Thr-2 to Lys-8, Val-47 to Trp-52. |
| 828802 | Preferred epitopes include those comprising a sequence shown in SEQ ID NO. 1130 as |
| | residues: Gly-41 to Met-47, Lys-59 to Arg-72. |
| 828803 | Preferred epitopes include those comprising a sequence shown in SEQ ID NO. 1131 as |
| | residues: Arg-8 to Thr-14, Ala-51 to Ser-58, Ser-60 to Ser-79, Leu-97 to His-104. |
| 828804 | Preferred epitopes include those comprising a sequence shown in SEQ ID NO. 1132 as |
| | residues: Lys-1 to Pro-12, Asn-43 to Lys-48. |
| 828805 | Preferred epitopes include those comprising a sequence shown in SEQ ID NO. 1133 as |
| | residues: Glu-15 to Ser-20, Thr-28 to Arg-39. |
| 828807 | Preferred epitopes include those comprising a sequence shown in SEQ ID NO. 1134 as |
| | residues: Glu-14 to Lys-19. |
| 828821 | Preferred epitopes include those comprising a sequence shown in SEQ ID NO. 1142 as |
| | residues: Cys-9 to Leu-15, His-28 to Gly-36. |
| 828825 | Preferred epitopes include those comprising a sequence shown in SEQ ID NO. 1145 as |
| | residues: Pro-38 to Pro-43. |
| 828826 | Preferred epitopes include those comprising a sequence shown in SEQ ID NO. 1146 as |
| | residues: Ile-7 to Leu-15, Lys-18 to Ser-36, Thr-66 to Lys-72, Thr-91 to Tyr-97, Val-99 to |
| | Cys-106, Glu-154 to Lys-159, Glu-171 to Asn-176, Met-187 to Ser-192, Leu-203 to Gln- |
| | 212. |
| 828829 | Preferred epitopes include those comprising a sequence shown in SEQ ID NO. 1147 as |
| | residues: Ser-52 to Glu-58. |
| 828835 | Preferred epitopes include those comprising a sequence shown in SEQ ID NO. 1150 as |
| | residues: Lys-89 to Ser-104. |
| 828838 | Preferred epitopes include those comprising a sequence shown in SEQ ID NO. 1151 as |
| | residues: Arg-1 to Arg-11. |
| 828840 | Preferred epitopes include those comprising a sequence shown in SEQ ID NO. 1152 as |
| | residues: Gly-32 to Gly-37. |
| 828845 | Preferred epitopes include those comprising a sequence shown in SEQ ID NO. 1153 as |
| | residues: Asn-23 to Tyr-34. |
| 828846 | Preferred epitopes include those comprising a sequence shown in SEQ ID NO. 1154 as |
| | residues: Ala-40 to Tyr-55, Glu-57 to Asn-66, Glu-74 to Asn-79. |
| 828847 | Preferred epitopes include those comprising a sequence shown in SEQ ID NO. 1155 as |
| | residues: Gln-66 to Gly-77, Gly-86 to Ala-93. |
| 828849 | Preferred epitopes include those comprising a sequence shown in SEQ ID NO. 1156 as |
| | residues: Arg-16 to Ser-25, Asp-97 to Pro-106, Pro-166 to Leu-176, Glu-271 to Gln-285, |
| | Thr-287 to Met-294, Ser-310 to Glu-316, Pro-330 to Gly-338, Phe-400 to Ser-415, Thr-425 |
| | to Ser-433, Lys-453 to Pro-469. |
| 828852 | Preferred epitopes include those comprising a sequence shown in SEQ ID NO. 1158 as |
| | residues: Val-33 to Ser-39. |
| 828853 | Preferred epitopes include those comprising a sequence shown in SEQ ID NO. 1159 as |
| | residues: Pro-25 to Ser-31, Ser-34 to Gly-41. |
| 828857 | Preferred epitopes include those comprising a sequence shown in SEQ ID NO. 1160 as |
| | residues: Lys-5 to Leu-10, Ser-20 to Glu-30, Leu-32 to Thr-37. |
| 828861 | Preferred epitopes include those comprising a sequence shown in SEQ ID NO. 1161 as |
| | residues: Arg-33 to Phe-38, Arg-59 to Gly-64, Pro-100 to His-121, Arg-144 to Pro-162, |
| | Gln-213 to Thr-221, Pro-262 to Trp-268, Ala-292 to Phe-302, Pro-315 to Pro-323. |
| 828866 | Preferred epitopes include those comprising a sequence shown in SEQ ID NO. 1162 as |
| | residues: Cys-1 to Gln-6, Gln-79 to Ala-89, Thr-96 to Leu-102. |
| 828872 | Preferred epitopes include those comprising a sequence shown in SEQ ID NO. 1163 as |
| | residues: Gly-17 to Leu-40, Ala-47 to Phe-63, Glu-66 to Val-71, Ile-75 to His-92, Glu-112 |
| | to Asn-119, Asp-122 to Arg-135, Asn-140 to Phe-152, Asn-160 to Arg-166. |
| 828874 | Preferred epitopes include those comprising a sequence shown in SEQ ID NO. 1164 as |
| | residues: Arg-1 to Ala-34, Pro-41 to Pro-47, Pro-49 to Asp-57, Asn-99 to Ala-105, Met-107 |
| | to Thr-112, Lys-118 to Ser-135, Glu-145 to Ile-156, Ala-202 to Lys-209, Lys-214 to Ile-220, |
| | Ala-224 to Ala-236, Ala-239 to Pro-248, Pro-260 to Lys-270, Lys-275 to Lys-300. |
| 828875 | Preferred epitopes include those comprising a sequence shown in SEQ ID NO. 1165 as |
| | residues: Pro-17 to Gly-24, His-31 to Phe-36, Glu-72 to Val-79, Val-99 to Asp-104. |
| 828878 | Preferred epitopes include those comprising a sequence shown in SEQ ID NO. 1167 as |
| | residues: Ser-33 to Asp-45, Thr-48 to Glu-53, Lys-70 to Glu-75, Phe-125 to Phe-131, Asp- |
| | 216 to Ile-223, Met-244 to Thr-252, Asn-272 to Leu-281, Gln-314 to Lys-320, Ala-340 to |
| | Ser-348. |
| 828879 | Preferred epitopes include those comprising a sequence shown in SEQ ID NO. 1168 as |
| | residues: Ser-1 to Arg-8. |
| 828881 | Preferred epitopes include those comprising a sequence shown in SEQ ID NO. 1169 as |
| | residues: Arg-1 to Lys-8, Asp-184 to Gly-190, Pro-269 to Asp-274. |
| 828885 | Preferred epitopes include those comprising a sequence shown in SEQ ID NO. 1170 as |
| | residues: Glu-6 to Gly-11, Gln-34 to Ala-41, Val-62 to Gly-69, Val-79 to Glu-92, Pro-95 to |
| | Asp-100, Lys-106 to Leu-123, Asp-178 to Asn-185, His-208 to Ser-213, Glu-224 to Val- |
| | 231, Gly-233 to Lys-241, Ser-254 to Ser-265, Phe-279 to Ser-285, Asn-292 to Gly-307, Lys- |
| | 311 to Gly-324. |
| 828887 | Preferred epitopes include those comprising a sequence shown in SEQ ID NO. 1172 as |
| | residues: Ala-1 to Lys-6, Ala-55 to Ser-60, Tyr-65 to Tyr-70, Thr-75 to Pro-84, Ser-106 to |
| | Ser-111, Asn-121 to Arg-131, Glu-145 to Pro-150, Pro-156 to His-171, Ser-188 to Leu-196, |
| | Asp-231 to His-238, Ser-276 to Arg-281, Arg-298 to Glu-307, Glu-332 to Glu-339, Tyr-355 |
| | to Thr-362, Ala-381 to Ser-392, Glu-409 to Val-422. |
| 828891 | Preferred epitopes include those comprising a sequence shown in SEQ ID NO. 1174 as |
| | residues: Pro-1 to Glu-18, Gly-26 to Pro-33, Pro-66 to Gly-75, Gln-105 to Val-110, Ser-128 |
| | to Pro-134, Glu-182 to Leu-187. |
| 828899 | Preferred epitopes include those comprising a sequence shown in SEQ ID NO. 1175 as |
| | residues: His-1 to Arg-11, Ser-40 to Gln-49. |
| 828907 | Preferred epitopes include those comprising a sequence shown in SEQ ID NO. 1176 as |
| | residues: Ser-21 to Asp-28, Pro-30 to Cys-38, Arg-98 to His-103, Asn-118 to Ile-136, Ser- |
| | 153 to Trp-161, Arg-163 to Tyr-172, Thr-174 to Ser-181. |
| 828917 | Preferred epitopes include those comprising a sequence shown in SEQ ID NO. 1179 as |
| | residues: His-1 to Gln-22, Thr-27 to Phe-38. |
| 828921 | Preferred epitopes include those comprising a sequence shown in SEQ ID NO. 1180 as |
| | residues: Glu-1 to Glu-6. |
| 828922 | Preferred epitopes include those comprising a sequence shown in SEQ ID NO. 1181 as |
| | residues: Thr-6 to Ser-21. |
| 828926 | Preferred epitopes include those comprising a sequence shown in SEQ ID NO. 1184 as |
| | residues: Gly-108 to Tyr-117. |
| 828928 | Preferred epitopes include those comprising a sequence shown in SEQ ID NO. 1185 as |
| | residues: Gln-7 to Trp-13, Pro-46 to Ala-55. |
| 828930 | Preferred epitopes include those comprising a sequence shown in SEQ ID NO. 1186 as |
| | residues: Glu-73 to His-79, Gly-105 to Tyr-110, Asp-161 to Asn-166, Lys-187 to Gln-196, |
| | Tyr-200 to Leu-206, Glu-222 to Met-229, Ala-252 to Ser-267, Asn-314 to Trp-323, Gly-344 |
| | to Asn-352. |
| 828937 | Preferred epitopes include those comprising a sequence shown in SEQ ID NO. 1188 as |
| | residues: Met-28 to Lys-33, Asp-40 to Ala-64, Tyr-72 to Lys-85, Thr-124 to Leu-131, Ala- |
| | 148 to Tyr-155. |
| 828940 | Preferred epitopes include those comprising a sequence shown in SEQ ID NO. 1189 as |
| | residues: Pro-23 to Gln-29, Ile-56 to Asn-61, Lys-69 to Lys-75. |
| 828943 | Preferred epitopes include those comprising a sequence shown in SEQ ID NO. 1191 as |
| | residues: Val-5 to Gly-11, Gln-26 to Asp-36, Val-93 to Lys-98, Lys-101 to Thr-124, Lys- |
| | 130 to Asp-141, Thr-163 to Lys-172, Ser-195 to Ala-200, Tyr-210 to Ile-220. |
| 828946 | Preferred epitopes include those comprising a sequence shown in SEQ ID NO. 1192 as |
| | residues: Arg-29 to Glu-34, Ala-74 to Leu-79, Ser-88 to Ala-96, Glu-126 to Leu-133, Glu- |
| | 149 to Pro-156, Pro-177 to Asp-182. |
| 828947 | Preferred epitopes include those comprising a sequence shown in SEQ ID NO. 1193 as |
| | residues: Lys-28 to Gly-40. |
| 828956 | Preferred epitopes include those comprising a sequence shown in SEQ ID NO. 1194 as |
| | residues: Pro-84 to Asp-94, Ile-99 to Asn-105, Lys-131 to Lys-136, Lys-141 to Asn-146, |
| | Lys-153 to His-162, Asp-170 to Arg-179, Gln-248 to Ile-258, Thr-262 to Leu-267, Thr-270 |
| | to Phe-279, Arg-294 to Leu-302. |
| 828958 | Preferred epitopes include those comprising a sequence shown in SEQ ID NO. 1195 as |
| | residues: Cys-14 to Ser-25. |
| 828965 | Preferred epitopes include those comprising a sequence shown in SEQ ID NO. 1196 as |
| | residues: Ala-29 to Leu-35, Pro-83 to Val-88. |
| 828969 | Preferred epitopes include those comprising a sequence shown in SEQ ID NO. 1197 as |
| | residues: Arg-2 to Gly-8. |
| 828971 | Preferred epitopes include those comprising a sequence shown in SEQ ID NO. 1198 as |
| | residues: Glu-53 to Lys-60. |
| 828973 | Preferred epitopes include those comprising a sequence shown in SEQ ID NO. 1199 as |
| | residues: Ser-18 to Thr-25, His-177 to Tyr-186. |
| 828980 | Preferred epitopes include those comprising a sequence shown in SEQ ID NO. 1200 as |
| | residues: Cys-4 to Glu-15. |
| 828984 | Preferred epitopes include those comprising a sequence shown in SEQ ID NO. 1201 as |
| | residues: Asn-14 to Lys-19, Asp-55 to Lys-64, Thr-120 to Glu-125, Pro-149 to Gly-154, |
| | His-206 to Lys-213, Pro-242 to Arg-249, Met-269 to Glu-279, Arg-281 to Ser-287, Phe-312 |
| | to Gly-317, Arg-361 to Ser-368, Glu-374 to Gln-380, Ile-386 to Tyr-391, Glu-412 to Gln- |
| | 428, Arg-435 to Val-471, Ser-483 to Lys-502, Lys-507 to Glu-517, Lys-519 to Pro-530, Ser- |
| | 541 to Pro-550, Gly-567 to Lys-589, Glu-593 to Val-613, Lys-616 to Leu-636, Ser-647 to |
| | Leu-673, Pro-677 to Glu-689. |
| 828988 | Preferred epitopes include those comprising a sequence shown in SEQ ID NO. 1203 as |
| | residues: Asp-60 to Lys-75. |
| 828995 | Preferred epitopes include those comprising a sequence shown in SEQ ID NO. 1205 as |
| | residues: Thr-26 to Gly-33, Ser-42 to Ser-53, Pro-73 to Leu-78, Pro-101 to Gly-107, Pro- |
| | 147 to Ser-157, Pro-168 to Ser-176, Ser-203 to His-208, Ser-216 to Cys-221. |
| 829005 | Preferred epitopes include those comprising a sequence shown in SEQ ID NO. 1207 as |
| | residues: Pro-17 to Glu-22, Thr-129 to Lys-137, Asp-164 to Asp-170. |
| 829009 | Preferred epitopes include those comprising a sequence shown in SEQ ID NO. 1208 as |
| | residues: Pro-1 to Arg-14, Pro-36 to Arg-54, Arg-61 to His-68, Arg-83 to Ile-92, Ala-95 to |
| | Arg-103, Arg-107 to Glu-114. |
| 829012 | Preferred epitopes include those comprising a sequence shown in SEQ ID NO. 1210 as |
| | residues: His-6 to Ser-11, Ser-122 to Asn-128, Leu-216 to Asp-221, Ser-323 to His-328. |
| 829013 | Preferred epitopes include those comprising a sequence shown in SEQ ID NO. 1211 as |
| | residues: Ile-10 to Leu-16, Pro-24 to Cys-29. |
| 829019 | Preferred epitopes include those comprising a sequence shown in SEQ ID NO. 1212 as |
| | residues: Tyr-29 to Ser-42. |
| 829020 | Preferred epitopes include those comprising a sequence shown in SEQ ID NO. 1213 as |
| | residues: Pro-22 to Arg-32, Leu-122 to Asp-127, Gln-134 to Tyr-140, Asp-153 to Arg-168. |
| 829021 | Preferred epitopes include those comprising a sequence shown in SEQ ID NO. 1214 as |
| | residues: Ile-11 to Phe-16, Pro-38 to Ile-53. |
| 829030 | Preferred epitopes include those comprising a sequence shown in SEQ ID NO. 1216 as |
| | residues: Lys-82 to Gly-87, Lys-224 to Asp-230, His-245 to Glu-253, Ser-279 to Lys-285, |
| | Val-308 to Lys-314, Arg-342 to Met-348, Lys-392 to Arg-397, His-452 to Gly-458. |
| 829035 | Preferred epitopes include those comprising a sequence shown in SEQ ID NO. 1217 as |
| | residues: His-36 to Ser-43. |
| 829051 | Preferred epitopes include those comprising a sequence shown in SEQ ID NO. 1221 as |
| | residues: Pro-3 to Trp-9. |
| 829052 | Preferred epitopes include those comprising a sequence shown in SEQ ID NO. 1222 as |
| | residues: Ala-32 to Pro-37, Pro-57 to Trp-62, Pro-82 to Leu-93. |
| 829057 | Preferred epitopes include those comprising a sequence shown in SEQ ID NO. 1223 as |
| | residues: Glu-9 to Thr-21, Leu-32 to Arg-45, Glu-49 to Ala-54, Lys-62 to Leu-68, Ala-71 to |
| | Thr-99, Leu-106 to Glu-113. |
| 829059 | Preferred epitopes include those comprising a sequence shown in SEQ ID NO. 1225 as |
| | residues: Asn-2 to Ser-16. |
| 829061 | Preferred epitopes include those comprising a sequence shown in SEQ ID NO. 1226 as |
| | residues: Lys-1 to Ser-7. |
| 829062 | Preferred epitopes include those comprising a sequence shown in SEQ ID NO. 1227 as |
| | residues: Pro-15 to Cys-23, Pro-46 to Ala-54, Pro-71 to Gly-78, Leu-84 to Pro-92, Leu-131 |
| | to Arg-137, Ala-151 to Glu-161, Thr-215 to Leu-222, Glu-253 to Ser-261, Leu-269 to Leu- |
| | 275, Asn-280 to Ser-285, Arg-292 to Glu-298, Gly-302 to Ser-309, Thr-322 to Arg-327, |
| | Lys-376 to Leu-388. |
| 829063 | Preferred epitopes include those comprising a sequence shown in SEQ ID NO. 1228 as |
| | residues: Gly-12 to Ala-20, Arg-58 to Phe-68. |
| 829064 | Preferred epitopes include those comprising a sequence shown in SEQ ID NO. 1229 as |
| | residues: Cys-9 to Tyr-14, Gly-35 to Thr-41, Ser-44 to Thr-49, Cys-53 to Thr-68, Leu-98 to |
| | Val-103, Ile-180 to Tyr-187, Ser-208 to Val-215. |
| 829066 | Preferred epitopes include those comprising a sequence shown in SEQ ID NO. 1230 as |
| | residues: Phe-15 to Met-20. |
| 829069 | Preferred epitopes include those comprising a sequence shown in SEQ ID NO. 1232 as |
| | residues: Asn-1 to Gly-12, Pro-31 to His-38, Ser-54 to Ser-59, Gly-64 to Lys-69. |
| 829074 | Preferred epitopes include those comprising a sequence shown in SEQ ID NO. 1233 as |
| | residues: Leu-1 to Thr-17, Glu-38 to Gln-44, Glu-46 to Asp-55, Glu-82 to Glu-100, Lys-119 |
| | to Gly-129, Lys-147 to Ser-153, Pro-187 to Thr-210, Leu-225 to Val-233, Pro-272 to Gly- |
| | 279, Arg-290 to Ser-303, Pro-311 to Lys-318, Ser-334 to Pro-356, Ser-370 to Arg-377, Gly- |
| | 407 to Ser-412, Met-415 to His-423. |
| 829077 | Preferred epitopes include those comprising a sequence shown in SEQ ID NO. 1234 as |
| | residues: Thr-1 to Thr-10, Asp-29 to Trp-35, His-37 to Trp-50, Lys-58 to Thr-65, Glu-77 to |
| | Glu-91, Glu-116 to Arg-128, Cys-219 to Pro-224. |
| 829085 | Preferred epitopes include those comprising a sequence shown in SEQ ID NO. 1237 as |
| | residues: Arg-9 to Lys-31, Leu-66 to Lys-71, Gln-119 to Gly-131, Gln-230 to Leu-239. |
| 829093 | Preferred epitopes include those comprising a sequence shown in SEQ ID NO. 1238 as |
| | residues: Gln-21 to Asp-26, Glu-178 to Asn-185, Arg-213 to Glu-218, Asp-238 to Asn-246, |
| | Val-264 to Pro-272, Val-280 to His-288. |
| 829099 | Preferred epitopes include those comprising a sequence shown in SEQ ID NO. 1239 as |
| | residues: Arg-2 to Ser-8, Thr-140 to Ser-151, Val-153 to His-165, Leu-176 to Arg-182, |
| | Asp-200 to Thr-207, Asn-224 to Asp-229, Cys-239 to Ser-246. |
| 829102 | Preferred epitopes include those comprising a sequence shown in SEQ ID NO. 1241 as |
| | residues: Pro-10 to Lys-19. |
| 829103 | Preferred epitopes include those comprising a sequence shown in SEQ ID NO. 1242 as |
| | residues: Pro-30 to His-46, Glu-127 to Leu-133. |
| 829104 | Preferred epitopes include those comprising a sequence shown in SEQ ID NO. 1243 as |
| | residues: Ser-19 to Trp-26, Lys-37 to Leu-59. |
| 829109 | Preferred epitopes include those comprising a sequence shown in SEQ ID NO. 1244 as |
| | residues: Gln-22 to Ser-29. |
| 829115 | Preferred epitopes include those comprising a sequence shown in SEQ ID NO. 1246 as |
| | residues: Gly-23 to Cys-29, Pro-35 to Cys-40, Gly-51 to Ser-64, Asp-108 to Arg-115, Glu- |
| | 132 to Val-146, Thr-149 to Glu-155. |
| 829120 | Preferred epitopes include those comprising a sequence shown in SEQ ID NO. 1249 as |
| | residues: Gly-68 to Arg-74, Pro-83 to Asn-88. |
| 829126 | Preferred epitopes include those comprising a sequence shown in SEQ ID NO. 1252 as |
| | residues: Lys-18 to Lys-28. |
| 829136 | Preferred epitopes include those comprising a sequence shown in SEQ ID NO. 1254 as |
| | residues: Asp-19 to His-26, Asp-127 to Gly-144, Thr-179 to Gln-194, Val-223 to Thr-229, |
| | Pro-235 to Tyr-240. |
| 829138 | Preferred epitopes include those comprising a sequence shown in SEQ ID NO. 1255 as |
| | residues: Ala-23 to Glu-28, Glu-37 to Ser-46, Glu-63 to Gly-68, Gln-75 to Phe-84, Thr-91 |
| | to Ser-97, His-106 to Pro-117. |
| 829142 | Preferred epitopes include those comprising a sequence shown in SEQ ID NO. 1256 as |
| | residues: Pro-21 to Thr-35. |
| 829148 | Preferred epitopes include those comprising a sequence shown in SEQ ID NO. 1257 as |
| | residues: Pro-33 to Lys-40. |
| 829149 | Preferred epitopes include those comprising a sequence shown in SEQ ID NO. 1258 as |
| | residues: His-9 to Glu-18, Arg-91 to Gly-96, Ser-124 to Asp-133, Asn-163 to Cys-172, |
| | Asn-216 to Thr-222, Thr-229 to Ile-235, Lys-238 to Glu-243. |
| 829162 | Preferred epitopes include those comprising a sequence shown in SEQ ID NO. 1260 as |
| | residues: Arg-1 to Arg-6, Ala-53 to Gln-58. |
| 829179 | Preferred epitopes include those comprising a sequence shown in SEQ ID NO. 1263 as |
| | residues: Gln-10 to Thr-21. |
| 829184 | Preferred epitopes include those comprising a sequence shown in SEQ ID NO. 1264 as |
| | residues: Thr-76 to Val-81, Leu-88 to Pro-100, Tyr-140 to Lys-150. |
| 829185 | Preferred epitopes include those comprising a sequence shown in SEQ ID NO. 1265 as |
| | residues: Pro-1 to Ser-21. |
| 829188 | Preferred epitopes include those comprising a sequence shown in SEQ ID NO. 1266 as |
| | residues: Lys-11 to Trp-20, Ser-22 to Ala-27, Ile-35 to Met-51, Val-53 to Glu-69, Asn-145 |
| | to Leu-151, Asp-179 to Gln-187, Pro-280 to Ala-285, Asp-293 to Ile-300. |
| 829190 | Preferred epitopes include those comprising a sequence shown in SEQ ID NO. 1267 as |
| | residues: Arg-3 to Gln-9, Pro-29 to Gln-34, Glu-98 to Asp-111. |
| 829196 | Preferred epitopes include those comprising a sequence shown in SEQ ID NO. 1269 as |
| | residues: Leu-53 to Asn-62, Ala-125 to Ala-132. |
| 829197 | Preferred epitopes include those comprising a sequence shown in SEQ ID NO. 1270 as |
| | residues: Leu-14 to Pro-19, Ser-25 to Ser-37. |
| 829203 | Preferred epitopes include those comprising a sequence shown in SEQ ID NO. 1272 as |
| | residues: Gly-1 to Leu-9, Ser-80 to Gly-85. |
| 829209 | Preferred epitopes include those comprising a sequence shown in SEQ ID NO. 1273 as |
| | residues: Ser-17 to Glu-29. |
| 829210 | Preferred epitopes include those comprising a sequence shown in SEQ ID NO. 1274 as |
| | residues: Ser-13 to Tyr-18. |
| 829214 | Preferred epitopes include those comprising a sequence shown in SEQ ID NO. 1275 as |
| | residues: Pro-2 to Asn-10, Lys-49 to Asn-54, Arg-91 to Asn-96, Glu-118 to Cys-125, Pro- |
| | 139 to Glu-144. |
| 829215 | Preferred epitopes include those comprising a sequence shown in SEQ ID NO. 1276 as |
| | residues: Asn-1 to Leu-6, Ser-27 to Pro-32. |
| 829219 | Preferred epitopes include those comprising a sequence shown in SEQ ID NO. 1277 as |
| | residues: Pro-15 to Pro-25, Ala-54 to Phe-61, Ile-63 to Ser-82. |
| 829220 | Preferred epitopes include those comprising a sequence shown in SEQ ID NO. 1278 as |
| | residues: Pro-1 to Ser-9, Glu-48 to Gly-54, Gly-66 to Leu-71, Pro-78 to Glu-84, Ala-108 to |
| | Gln-116, Ile-167 to Asp-172, Thr-179 to His-185. |
| 829222 | Preferred epitopes include those comprising a sequence shown in SEQ ID NO. 1279 as |
| | residues: Thr-45 to Gln-51, Cys-53 to Asp-60, Gly-122 to Gly-127, Lys-136 to Gly-142, |
| | Pro-164 to Lys-172. |
| 829223 | Preferred epitopes include those comprising a sequence shown in SEQ ID NO. 1280 as |
| | residues: Ile-11 to Trp-16. |
| 829225 | Preferred epitopes include those comprising a sequence shown in SEQ ID NO. 1281 as |
| | residues: Lys-24 to Trp-30. |
| 829226 | Preferred epitopes include those comprising a sequence shown in SEQ ID NO. 1282 as |
| | residues: Lys-48 to Lys-56, Arg-64 to Glu-79, Glu-102 to Tyr-111, Glu-159 to Cys-165, |
| | Thr-187 to Lys-193, Tyr-212 to Arg-220, Tyr-254 to Pro-262, Gly-278 to Asp-284, Pro-336 |
| | to Pro-341, Pro-441 to Gly-452, Glu-468 to Asp-480, Phe-486 to Tyr-495, Asp-498 to Asn- |
| | 503. |
| 829227 | Preferred epitopes include those comprising a sequence shown in SEQ ID NO. 1283 as |
| | residues: Pro-40 to Ala-46. |
| 829231 | Preferred epitopes include those comprising a sequence shown in SEQ ID NO. 1284 as |
| | residues: Cys-12 to Ser-17. |
| 829233 | Preferred epitopes include those comprising a sequence shown in SEQ ID NO. 1286 as |
| | residues: Pro-5 to Met-16, Ala-37 to Ala-46, Pro-70 to Leu-75. |
| 829239 | Preferred epitopes include those comprising a sequence shown in SEQ ID NO. 1287 as |
| | residues: Glu-63 to Arg-70, Pro-82 to Leu-91, Arg-139 to Gln-146. |
| 829242 | Preferred epitopes include those comprising a sequence shown in SEQ ID NO. 1289 as |
| | residues: Arg-11 to Gly-17, Lys-113 to Gly-120, Arg-163 to Ser-168, Asp-200 to His-210, |
| | Ile-217 to Ile-223, Arg-260 to Glu-266, Ser-274 to Leu-281. |
| 829246 | Preferred epitopes include those comprising a sequence shown in SEQ ID NO. 1290 as |
| | residues: Arg-17 to Phe-25, Asn-27 to Asn-41, Thr-57 to Ser-69, Gln-92 to Asp-98. |
| 829250 | Preferred epitopes include those comprising a sequence shown in SEQ ID NO. 1291 as |
| | residues: Ser-2 to Ile-16. |
| 829253 | Preferred epitopes include those comprising a sequence shown in SEQ ID NO. 1292 as |
| | residues: Arg-10 to Arg-20, Gly-48 to Val-53, Glu-69 to Asp-76, Glu-116 to Glu-122, Glu- |
| | 132 to Trp-143, Asp-166 to Asn-175, Arg-191 to Asn-197, Gln-205 to Gly-233, Lys-235 to |
| | Ala-274. |
| 829263 | Preferred epitopes include those comprising a sequence shown in SEQ ID NO. 1294 as |
| | residues: Pro-1 to Arg-13, Gly-20 to Gly-27, Gly-32 to Lys-38. |
| 829266 | Preferred epitopes include those comprising a sequence shown in SEQ ID NO. 1295 as |
| | residues: Lys-1 to Arg-6. |
| 829271 | Preferred epitopes include those comprising a sequence shown in SEQ ID NO. 1296 as |
| | residues: Ala-7 to Thr-13, Lys-56 to Lys-66, Pro-81 to Asp-88, Glu-140 to Thr-148, Ser- |
| | 158 to Gln-164, Glu-201 to Asp-207, Glu-221 to Ser-230, Pro-236 to Gly-241, Pro-243 to |
| | Arg-261, Gln-270 to Gly-286. |
| 829273 | Preferred epitopes include those comprising a sequence shown in SEQ ID NO. 1297 as |
| | residues: Ser-19 to Ala-24. |
| 829274 | Preferred epitopes include those comprising a sequence shown in SEQ ID NO. 1298 as |
| | residues: Pro-58 to Ser-64. |
| 829276 | Preferred epitopes include those comprising a sequence shown in SEQ ID NO. 1299 as |
| | residues: Arg-5 to Glu-38. |
| 829280 | Preferred epitopes include those comprising a sequence shown in SEQ ID NO. 1301 as |
| | residues: Ser-31 to Arg-36, Gln-61 to Lys-66. |
| 829284 | Preferred epitopes include those comprising a sequence shown in SEQ ID NO. 1303 as |
| | residues: Arg-1 to Thr-7, Ala-9 to Arg-14, Gly-24 to Gly-29, Gly-52 to Ala-60, Arg-62 to |
| | Gly-71, Arg-84 to Asn-96, Pro-102 to Thr-107. |
| 829287 | Preferred epitopes include those comprising a sequence shown in SEQ ID NO. 1305 as |
| | residues: Gln-38 to Lys-45. |
| 829295 | Preferred epitopes include those comprising a sequence shown in SEQ ID NO. 1306 as |
| | residues: Pro-1 to Lys-13, Ala-32 to Gln-44. |
| 829296 | Preferred epitopes include those comprising a sequence shown in SEQ ID NO. 1307 as |
| | residues: Glu-45 to Glu-59, Phe-61 to His-67, Ala-78 to Ser-85, Trp-100 to Pro-105. |
| 829298 | Preferred epitopes include those comprising a sequence shown in SEQ ID NO. 1309 as |
| | residues: Phe-4 to Gln-10. |
| 829302 | Preferred epitopes include those comprising a sequence shown in SEQ ID NO. 1310 as |
| | residues: Ser-17 to Trp-22, Ser-73 to Arg-80. |
| 829320 | Preferred epitopes include those comprising a sequence shown in SEQ ID NO. 1312 as |
| | residues: Val-5 to Lys-18, Val-56 to Lys-64, Pro-94 to Gly-100, Phe-140 to Met-148, Glu- |
| | 154 to Asp-161, Pro-182 to Cys-188, Pro-190 to Asn-197, Ala-216 to Leu-224. |
| 829322 | Preferred epitopes include those comprising a sequence shown in SEQ ID NO. 1313 as |
| | residues: Pro-14 to Lys-26, Asp-31 to Lys-39, Arg-112 to Ile-120, Arg-128 to Gly-141, |
| | Lys-144 to Asp-151, Lys-159 to Gly-165, His-187 to Trp-203, Asn-246 to Ala-251, Ala-261 |
| | to Gln-266, Glu-271 to Thr-280. |
| 829355 | Preferred epitopes include those comprising a sequence shown in SEQ ID NO. 1314 as |
| | residues: Ala-26 to Leu-33, Arg-120 to Phe-126, Thr-191 to Asn-203, Ser-223 to Pro-232. |
| 829364 | Preferred epitopes include those comprising a sequence shown in SEQ ID NO. 1315 as |
| | residues: Arg-9 to Leu-15, Leu-67 to Ser-74, Asp-93 to Tyr-98, Leu-101 to Pro-108, Lys- |
| | 117 to Thr-123, Thr-138 to Leu-143. |
| 829946 | Preferred epitopes include those comprising a sequence shown in SEQ ID NO. 1319 as |
| | residues: Pro-20 to Gly-29, Gly-46 to Thr-56. |
| 829952 | Preferred epitopes include those comprising a sequence shown in SEQ ID NO. 1321 as |
| | residues: Pro-11 to Glu-34, Leu-82 to Gln-88. |
| 829954 | Preferred epitopes include those comprising a sequence shown in SEQ ID NO. 1322 as |
| | residues: Leu-32 to Val-38, Gly-75 to Ser-83, Ser-86 to Tyr-92, Lys-96 to His-104, Ser-109 |
| | to Ser-117, Gln-124 to Ser-130, Asn-132 to Asn-141, Pro-164 to Leu-178, His-187 to Gly- |
| | 194, Pro-203 to Gln-217. |
| 829955 | Preferred epitopes include those comprising a sequence shown in SEQ ID NO. 1323 as |
| | residues: Asp-39 to Gly-45, Asn-53 to Arg-80, Gln-85 to Gly-95, Glu-101 to Glu-111, His- |
| | 132 to Gly-151, Leu-159 to Tyr-166, Ser-174 to Ser-179, His-188 to Gly-200, Gln-226 to |
| | Gly-235, Cys-255 to Gly-263. |
| 829957 | Preferred epitopes include those comprising a sequence shown in SEQ ID NO. 1324 as |
| | residues: Gly-1 to Phe-12, Thr-14 to Val-22, Arg-30 to Met-37, Arg-63 to Pro-69, Arg-82 to |
| | Tyr-95, Glu-102 to Gly-109, Lys-223 to Leu-240. |
| 829958 | Preferred epitopes include those comprising a sequence shown in SEQ ID NO. 1325 as |
| | residues: Arg-13 to Trp-31, Val-61 to Asn-67, Lys-87 to Arg-92, Leu-97 to Asp-109, Ser- |
| | 129 to Asp-139. |
| 829960 | Preferred epitopes include those comprising a sequence shown in SEQ ID NO. 1326 as |
| | residues: Ile-1 to Ser-10, Ile-26 to Pro-31, Lys-83 to Asp-89, Gly-96 to Asn-101, Pro-122 to |
| | Asn-127, Ser-224 to Ile-231, Asp-350 to Pro-356. |
| 829966 | Preferred epitopes include those comprising a sequence shown in SEQ ID NO. 1327 as |
| | residues: Tyr-7 to Tyr-15, Pro-43 to Ala-52, Gln-57 to Ala-62, Asn-68 to Ala-73, Tyr-75 to |
| | Met-83. |
| 829981 | Preferred epitopes include those comprising a sequence shown in SEQ ID NO. 1330 as |
| | residues: Ala-96 to Lys-111, Cys-117 to Cys-128. |
| 829985 | Preferred epitopes include those comprising a sequence shown in SEQ ID NO. 1331 as |
| | residues: Arg-11 to Val-19, Ala-21 to Trp-26, Tyr-54 to Lys-76, His-107 to Gln-112. |
| 829988 | Preferred epitopes include those comprising a sequence shown in SEQ ID NO. 1333 as |
| | residues: Leu-32 to Glu-43, Gly-50 to Arg-58. |
| 829990 | Preferred epitopes include those comprising a sequence shown in SEQ ID NO. 1334 as |
| | residues: Ser-27 to Ser-34, Gly-41 to Val-46. |
| 829991 | Preferred epitopes include those comprising a sequence shown in SEQ ID NO. 1335 as |
| | residues: Leu-15 to Gln-25. |
| 829992 | Preferred epitopes include those comprising a sequence shown in SEQ ID NO. 1336 as |
| | residues: Asp-1 to Gly-8, Lys-26 to Trp-33, Pro-49 to Pro-54. |
| 829993 | Preferred epitopes include those comprising a sequence shown in SEQ ID NO. 1337 as |
| | residues: Leu-3 to Ser-9. |
| 829998 | Preferred epitopes include those comprising a sequence shown in SEQ ID NO. 1338 as |
| | residues: Glu-42 to Leu-47, Glu-125 to Ala-136. |
| 830001 | Preferred epitopes include those comprising a sequence shown in SEQ ID NO. 1341 as |
| | residues: Gly-1 to Met-8, Ile-12 to Pro-17, Gly-77 to Ser-92. |
| 830010 | Preferred epitopes include those comprising a sequence shown in SEQ ID NO. 1344 as |
| | residues: Cys-1 to Ser-6, Ala-55 to Ala-65, Pro-92 to Asn-97, Gln-100 to Pro-106, Gly-119 |
| | to Gly-125, Leu-135 to Arg-143, Ser-151 to Asp-159, Gln-164 to Ser-169, Thr-180 to Asn- |
| | 186, Ser-204 to Val-216, Pro-224 to Arg-250, His-275 to Tyr-287. |
| 830128 | Preferred epitopes include those comprising a sequence shown in SEQ ID NO. 1346 as |
| | residues: His-4 to Thr-10. |
| 830129 | Preferred epitopes include those comprising a sequence shown in SEQ ID NO. 1347 as |
| | residues: Trp-52 to Thr-58, Arg-222 to Gly-227, Asn-255 to Asp-265, Pro-452 to Arg-458, |
| | Glu-503 to Lys-509, Gly-556 to Asn-563, Asp-628 to Glu-633, Glu-676 to Ser-697, Ala-708 |
| | to Ser-714. |
| 830140 | Preferred epitopes include those comprising a sequence shown in SEQ ID NO. 1349 as |
| | residues: Gln-61 to Lys-67. |
| 830157 | Preferred epitopes include those comprising a sequence shown in SEQ ID NO. 1350 as |
| | residues: Pro-1 to Arg-7, Arg-14 to Glu-24. |
| 830195 | Preferred epitopes include those comprising a sequence shown in SEQ ID NO. 1351 as |
| | residues: Ser-2 to Arg-14, Ala-37 to Lys-45, Glu-60 to Leu-68, His-75 to Glu-82, Arg-92 to |
| | Ser-99, Gly-105 to Gln-110, Arg-119 to Phe-125. |
| 830196 | Preferred epitopes include those comprising a sequence shown in SEQ ID NO. 1352 as |
| | residues: Lys-15 to Val-27, Glu-47 to Ile-79, Gly-83 to Phe-133, Lys-135 to Glu-142, Glu |
| | 174 to Ile-182, Ala-249 to Lys-257, Glu-272 to Leu-280, His-287 to Glu-294, Arg-304 to |
| | Ser-311, Gly-317 to Gln-322, Leu-372 to Lys-388, His-404 to Leu-409. |
| 830409 | Preferred epitopes include those comprising a sequence shown in SEQ ID NO. 1353 as |
| | residues: Ser-4 to Ala-9. |
| 830417 | Preferred epitopes include those comprising a sequence shown in SEQ ID NO. 1354 as |
| | residues: Pro-33 to Leu-39, Glu-54 to Val-59, Gly-69 to Ser-76. |
| 830531 | Preferred epitopes include those comprising a sequence shown in SEQ ID NO. 1355 as |
| | residues: Lys-29 to Glu-37, Leu-126 to Gly-131, Asp-149 to Glu-159, Pro-235 to Thr-255. |
| 830677 | Preferred epitopes include those comprising a sequence shown in SEQ ID NO. 1356 as |
| | residues: Leu-23 to Val-37, Glu-39 to Asp-51, Gly-66 to Arg-71, Gly-79 to Gly-85, Pro-87 |
| | to Leu-94, Gly-102 to Lys-123, Ser-135 to Asp-142, Gln-145 to Arg-158, Gln-169 to Glu- |
| | 174, Ala-178 to Gln-190, Ala-196 to Glu-209, Glu-212 to Glu-220, Arg-249 to His-255, |
| | Ala-298 to Glu-309, Arg-314 to Lys-368. |
| 831355 | Preferred epitopes include those comprising a sequence shown in SEQ ID NO. 1357 as |
| | residues: Lys-49 to Gln-55, Glu-83 to Lys-90, Gly-158 to Gly-164, Lys-185 to Gly-192. |
| 831420 | Preferred epitopes include those comprising a sequence shown in SEQ ID NO. 1358 as |
| | residues: Ala-6 to His-19, Glu-28 to Ser-42. |
| 831702 | Preferred epitopes include those comprising a sequence shown in SEQ ID NO. 1359 as |
| | residues: Gly-1 to Gly-12, Glu-23 to Gly-28, Gln-56 to Trp-62, Lys-75 to Thr-103, Arg-217 |
| | to Asp-223. |
| 832488 | Preferred epitopes include those comprising a sequence shown in SEQ ID NO. 1361 as |
| | residues: Leu-52 to Thr-59, Pro-86 to Ser-92, Arg-107 to Gly-118, Lys-121 to Gly-128. |
| 833207 | Preferred epitopes include those comprising a sequence shown in SEQ ID NO. 1362 as |
| | residues: Val-29 to Arg-43, Gly-66 to Arg-75, Ser-94 to Gly-99, Ser-106 to Ser-112, Asp- |
| | 135 to Leu-151. |
| 835940 | Preferred epitopes include those comprising a sequence shown in SEQ ID NO. 1363 as |
| | residues: Arg-9 to Gln-35, Arg-94 to Cys-104. |
| 837105 | Preferred epitopes include those comprising a sequence shown in SEQ ID NO. 1365 as |
| | residues: Ser-59 to Ser-65, Gln-75 to Gln-80. |
| 837373 | Preferred epitopes include those comprising a sequence shown in SEQ ID NO. 1367 as |
| | residues: Arg-48 to Tyr-58, Asp-67 to Lys-75. |
| 837687 | Preferred epitopes include those comprising a sequence shown in SEQ ID NO. 1368 as |
| | residues: Gly-1 to Asp-9, Ser-40 to Lys-46, Ser-65 to Pro-72, Lys-124 to Asn-137. |
| 837991 | Preferred epitopes include those comprising a sequence shown in SEQ ID NO. 1369 as |
| | residues: Lys-41 to Lys-48. |
| 838442 | Preferred epitopes include those comprising a sequence shown in SEQ ID NO. 1370 as |
| | residues: Cys-7 to Glu-13, Tyr-27 to Phe-37, Phe-64 to Gly-72, Val-96 to Asp-105, Asp- |
| | 111 to Ala-117, Arg-119 to Gly-125. |
| 840541 | Preferred epitopes include those comprising a sequence shown in SEQ ID NO. 1371 as |
| | residues: Phe-38 to His-43, Asp-53 to Asp-61. |
| 840543 | Preferred epitopes include those comprising a sequence shown in SEQ ID NO. 1372 as |
| | residues: Ala-26 to Pro-32, Ser-49 to Ala-59, Glu-106 to Arg-112, Gly-140 to Arg-149, |
| | Ala-159 to Trp-181, Glu-216 to Leu-229, Ile-243 to Ser-250, Phe-254 to Lys-259. |
| 840563 | Preferred epitopes include those comprising a sequence shown in SEQ ID NO. 1374 as |
| | residues: Ala-67 to Pro-87. |
| 840565 | Preferred epitopes include those comprising a sequence shown in SEQ ID NO. 1375 as |
| | residues: Gln-6 to Asn-13, Ser-29 to Lys-37, Arg-73 to Val-78. |
| 840569 | Preferred epitopes include those comprising a sequence shown in SEQ ID NO. 1376 as |
| | residues: Ile-1 to Thr-6. |
| 840570 | Preferred epitopes include those comprising a sequence shown in SEQ ID NO. 1377 as |
| | residues: Pro-9 to Asp-23. |
| 840571 | Preferred epitopes include those comprising a sequence shown in SEQ ID NO. 1378 as |
| | residues: Gly-1 to Leu-6, Gln-13 to Ser-19. |
| 840573 | Preferred epitopes include those comprising a sequence shown in SEQ ID NO. 1379 as |
| | residues: Arg-1 to Ala-7, Cys-16 to Cys-21, Arg-28 to Trp-33, Ala-36 to Gln-42, Arg-50 to |
| | Val-55, Gly-63 to Gly-74, Glu-100 to Lys-112, Lys-121 to Gln-126, Asp-132 to Leu-148, |
| | Ser-155 to Ser-161, Thr-167 to Ser-187, Arg-219 to Leu-228. |
| 840574 | Preferred epitopes include those comprising a sequence shown in SEQ ID NO. 1380 as |
| | residues: Lys-60 to Lys-72, Asn-81 to Pro-88. |
| 840575 | Preferred epitopes include those comprising a sequence shown in SEQ ID NO. 1381 as |
| | residues: Pro-1 to Arg-6, Tyr-16 to Gly-32, Ser-67 to Gly-74, Ser-95 to Gly-101, Glu-194 to |
| | Lys-218, Lys-295 to Leu-305, Met-332 to Glu-337, Leu-339 to Ala-347, Glu-353 to Leu- |
| | 358, Ile-369 to Glu-375, Glu-437 to Gln-444, Glu-467 to Gly-478, Gly-481 to Gly-505. |
| 840579 | Preferred epitopes include those comprising a sequence shown in SEQ ID NO. 1382 as |
| | residues: Pro-40 to Ala-50, Lys-71 to Leu-76, Glu-125 to Lys-138, Cys-153 to Ser-159, |
| | Arg-167 to Glu-173, Lys-210 to Ser-215, Asn-251 to Ser-260, Trp-289 to Ser-296, Ala-358 |
| | to Ala-363, Thr-369 to Gly-376, Asn-404 to Gly-410, Pro-425 to Glu-433, His-439 to Glu- |
| | 450, Gln-470 to Ile-476, Thr-493 to Leu-499. |
| 840580 | Preferred epitopes include those comprising a sequence shown in SEQ ID NO. 1383 as |
| | residues: Glu-13 to Ile-28, Pro-70 to Gly-75. |
| 840581 | Preferred epitopes include those comprising a sequence shown in SEQ ID NO. 1384 as |
| | residues: Ser-1 to Gly-12, Thr-27 to Pro-36, Ser-50 to Met-56. |
| 840605 | Preferred epitopes include those comprising a sequence shown in SEQ ID NO. 1385 as |
| | residues: Leu-12 to Leu-17, Glu-49 to Ser-54. |
| 840610 | Preferred epitopes include those comprising a sequence shown in SEQ ID NO. 1388 as |
| | residues: Thr-19 to Lys-26, Gly-46 to Thr-52, Thr-63 to Glu-68, Gly-145 to Gly-153, Ser- |
| | 236 to Thr-241, Ser-253 to Arg-263, Glu-291 to Asp-296. |
| 840612 | Preferred epitopes include those comprising a sequence shown in SEQ ID NO. 1390 as |
| | residues: Arg-101 to Arg-108, Trp-119 to Ala-125, Ala-131 to Asn-138, Leu-142 to Thr- |
| | 150, His-354 to Ile-370. |
| 840622 | Preferred epitopes include those comprising a sequence shown in SEQ ID NO. 1392 as |
| | residues: Asp-6 to Gly-11, Ala-13 to Ser-28, His-40 to Thr-232, Arg-242 to Gly-247, Gly- |
| | 268 to Gln-276. |
| 840624 | Preferred epitopes include those comprising a sequence shown in SEQ ID NO. 1394 as |
| | residues: Lys-5 to Gly-12, Ala-20 to Met-26, Gly-49 to Ser-55, Pro-57 to Tyr-63. |
| 840631 | Preferred epitopes include those comprising a sequence shown in SEQ ID NO. 1395 as |
| | residues: Glu-8 to Arg-24, Ser-36 to Ser-44, Phe-78 to Arg-84, Ser-116 to Trp-123, Gly-266 |
| | to Gly-274, Lys-327 to Lys-332. |
| 840633 | Preferred epitopes include those comprising a sequence shown in SEQ ID NO. 1397 as |
| | residues: Ser-137 to Ala-146, Gln-165 to Gln-171. |
| 840636 | Preferred epitopes include those comprising a sequence shown in SEQ ID NO. 1400 as |
| | residues: Lys-24 to Tyr-32, Tyr-42 to Lys-47, Gly-60 to Ala-66, Pro-68 to His-77. |
| 840637 | Preferred epitopes include those comprising a sequence shown in SEQ ID NO. 1401 as |
| | residues: Ala-10 to Gln-16, Gly-29 to Glu-40, Arg-45 to Ser-51, Thr-62 to Pro-67. |
| 840639 | Preferred epitopes include those comprising a sequence shown in SEQ ID NO. 1402 as |
| | residues: Pro-35 to Asn-48, Ser-66 to Ser-73, Asp-76 to Gly-81, Gly-115 to Glu-120, Asp- |
| | 131 to Gly-147, Ser-152 to Gly-158, Pro-175 to Ser-184, Arg-206 to Asn-220. |
| 840640 | Preferred epitopes include those comprising a sequence shown in SEQ ID NO. 1403 as |
| | residues: Ser-118 to Ile-123. |
| 840650 | Preferred epitopes include those comprising a sequence shown in SEQ ID NO. 1404 as |
| | residues: Leu-30 to Glu-44, Gly-52 to Ala-57, Tyr-133 to Leu-140, Asp-207 to Ser-219, |
| | Gln-272 to Asn-281. |
| 840652 | Preferred epitopes include those comprising a sequence shown in SEQ ID NO. 1405 as |
| | residues: Trp-33 to Gly-64. |
| 840653 | Preferred epitopes include those comprising a sequence shown in SEQ ID NO. 1406 as |
| | residues: Pro-1 to Ser-6, Leu-14 to Ser-40, Leu-81 to Asp-93, Pro-125 to Phe-130, Gly-137 |
| | to Glu-148, Trp-238 to Arg-246, Gln-279 to Asp-295, Cys-305 to Pro-311. |
| 840655 | Preferred epitopes include those comprising a sequence shown in SEQ ID NO. 1407 as |
| | residues: Pro-2 to His-7. |
| 840659 | Preferred epitopes include those comprising a sequence shown in SEQ ID NO. 1408 as |
| | residues: Gln-1 to Val-15, Ser-21 to Gly-27, Pro-32 to Trp-42, Asn-272 to Arg-277, Pro- |
| | 314 to Gln-336. |
| 840660 | Preferred epitopes include those comprising a sequence shown in SEQ ID NO. 1409 as |
| | residues: Glu-1 to Asn-17. |
| 840661 | Preferred epitopes include those comprising a sequence shown in SEQ ID NO. 1410 as |
| | residues: Cys-7 to Ser-20, Pro-35 to Pro-42, Pro-67 to Ile-80, Thr-94 to Met-100, Leu-122 |
| | to Cys-129. |
| 840662 | Preferred epitopes include those comprising a sequence shown in SEQ ID NO. 1411 as |
| | residues: Gln-97 to Leu-102, Ala-130 to Ser-136, Ser-142 to Thr-148, Ala-180 to Ser-186, |
| | Pro-191 to Glu-198, Asn-234 to Leu-240, Ser-270 to His-280. |
| 840663 | Preferred epitopes include those comprising a sequence shown in SEQ ID NO. 1412 as |
| | residues: Pro-1 to Gly-12. |
| 840670 | Preferred epitopes include those comprising a sequence shown in SEQ ID NO. 1413 as |
| | residues: Gly-65 to Cys-71, Lys-81 to Gln-88, Thr-97 to Asp-106, Glu-135 to Gly-143, Pro- |
| | 161 to Ala-169. |
| 840671 | Preferred epitopes include those comprising a sequence shown in SEQ ID NO. 1414 as |
| | residues: Pro-4 to Thr-11, Ala-15 to Pro-20. |
| 840672 | Preferred epitopes include those comprising a sequence shown in SEQ ID NO. 1415 as |
| | residues: Asp-3 to Ala-10, Val-23 to Thr-34, Gln-96 to Asp-101, Thr-118 to Gly-126, Ala- |
| | 130 to Lys-140, Thr-156 to Ser-176, Pro-268 to Gln-275, Pro-296 to Gly-304, Pro-342 to |
| | Pro-348, Glu-382 to Asp-389, Met-408 to Glu-414, Pro-425 to Gln-443, Pro-457 to Tyr-478, |
| | Glu-481 to Tyr-505, Gly-514 to Arg-521, Pro-525 to Gly-547, Ala-555 to Gln-567. |
| 840673 | Preferred epitopes include those comprising a sequence shown in SEQ ID NO. 1416 as |
| | residues: Ser-9 to Gly-15, Ser-57 to Arg-72, Lys-90 to Pro-111, Pro-138 to Ser-151, Asp- |
| | 188 to Arg-193. |
| 840677 | Preferred epitopes include those comprising a sequence shown in SEQ ID NO. 1418 as |
| | residues: Gly-17 to Asn-22, Ser-59 to Val-74, Glu-83 to Glu-89, Leu-91 to Ser-97, Glu-165 |
| | to Leu-183, Ala-197 to Ile-202, Ala-207 to Pro-212, Lys-227 to Lys-243, Pro-251 to His- |
| | 258. |
| 840678 | Preferred epitopes include those comprising a sequence shown in SEQ ID NO. 1419 as |
| | residues: Glu-43 to Glu-48, Gly-75 to Asp-81, Arg-92 to Ser-100, Asp-108 to Tyr-114, Ala- |
| | 154 to Asn-161, Thr-266 to Gln-272. |
| 840680 | Preferred epitopes include those comprising a sequence shown in SEQ ID NO. 1420 as |
| | residues: Pro-2 to Gly-8. |
| 840691 | Preferred epitopes include those comprising a sequence shown in SEQ ID NO. 1421 as |
| | residues: Gln-58 to Ser-64, Asp-83 to Met-88, Ser-104 to Pro-114, Asn-137 to Ser-146, Pro- |
| | 179 to Gly-185, Arg-206 to Glu-228, Gly-237 to Thr-258, Gln-269 to Asp-275. |
| 840700 | Preferred epitopes include those comprising a sequence shown in SEQ ID NO. 1422 as |
| | residues: His-25 to Cys-32, Arg-46 to Glu-52. |
| 840701 | Preferred epitopes include those comprising a sequence shown in SEQ ID NO. 1423 as |
| | residues: Gln-8 to Trp-13, Lys-21 to Asp-28, Ile-107 to Leu-112, Lys-125 to Trp-130, Leu- |
| | 159 to Thr-164. |
| 840702 | Preferred epitopes include those comprising a sequence shown in SEQ ID NO. 1424 as |
| | residues: Asp-22 to Met-37. |
| 840705 | Preferred epitopes include those comprising a sequence shown in SEQ ID NO. 1425 as |
| | residues: Asp-4 to Pro-12, His-29 to Ala-39, Leu-43 to Glu-66, Asp-71 to Glu-78, Leu-84 to |
| | Asp-98, Glu-102 to Ile-121, Pro-137 to Tyr-143. |
| 840715 | Preferred epitopes include those comprising a sequence shown in SEQ ID NO. 1426 as |
| | residues: Cys-1 to Gln-42. |
| 840717 | Preferred epitopes include those comprising a sequence shown in SEQ ID NO. 1427 as |
| | residues: Cys-1 to Gln-6, Val-19 to Ala-24. |
| 840718 | Preferred epitopes include those comprising a sequence shown in SEQ ID NO. 1428 as |
| | residues: Gln-1 to Ser-14. |
| 840724 | Preferred epitopes include those comprising a sequence shown in SEQ ID NO. 1430 as |
| | residues: Cys-53 to Lys-59, Thr-61 to Cys-67, Gly-86 to Cys-93. |
| 840725 | Preferred epitopes include those comprising a sequence shown in SEQ ID NO. 1431 as |
| | residues: Trp-22 to Thr-27. |
| 840727 | Preferred epitopes include those comprising a sequence shown in SEQ ID NO. 1432 as |
| | residues: Thr-1 to Gln-8, Val-23 to Gln-28, Glu-51 to His-63, Glu-73 to Gln-91. |
| 840731 | Preferred epitopes include those comprising a sequence shown in SEQ ID NO. 1433 as |
| | residues: Thr-35 to Glu-43, Leu-54 to Leu-60, Pro-89 to Gly-107, Val-109 to Gly-117, Gln- |
| | 119 to Thr-125. |
| 840733 | Preferred epitopes include those comprising a sequence shown in SEQ ID NO. 1434 as |
| | residues: Asp-33 to Ser-48, Pro-62 to Gly-76, Ser-80 to Gln-89, Gly-96 to Trp-109. |
| 840734 | Preferred epitopes include those comprising a sequence shown in SEQ ID NO. 1435 as |
| | residues: Gln-12 to Gln-17. |
| 840736 | Preferred epitopes include those comprising a sequence shown in SEQ ID NO. 1436 as |
| | residues: Arg-7 to Val-13, Leu-28 to Arg-33, Ser-69 to Gln-76. |
| 840746 | Preferred epitopes include those comprising a sequence shown in SEQ ID NO. 1439 as |
| | residues: Asp-7 to Ser-13, Gln-21 to Lys-30, Gln-34 to Val-49, Glu-68 to Glu-73, Leu-79 to |
| | Leu-96, Glu-109 to Glu-115, Leu-146 to Ser-153, Leu-197 to Asn-206, Ser-218 to Glu-223, |
| | Ala-278 to Trp-283, Lys-297 to Phe-303, Ser-318 to Val-323. |
| 840748 | Preferred epitopes include those comprising a sequence shown in SEQ ID NO. 1440 as |
| | residues: Lys-11 to Trp-24, Arg-30 to Ser-36, Arg-41 to Ser-55, Ser-68 to Arg-74, Leu-102 |
| | to Lys-108, Val-162 to Thr-167, Ser-188 to Lys-195, Glu-211 to His-216, Arg-253 to Arg- |
| | 268, Ser-273 to Pro-279, Arg-325 to Glu-330, Lys-358 to Asp-364. |
| 840750 | Preferred epitopes include those comprising a sequence shown in SEQ ID NO. 1441 as |
| | residues: Met-48 to Gln-55, Ile-64 to Arg-69. |
| 840751 | Preferred epitopes include those comprising a sequence shown in SEQ ID NO. 1442 as |
| | residues: Thr-30 to Lys-37, Gln-51 to Pro-56, Thr-58 to Val-72, Lys-81 to Val-88, Glu-90 |
| | to Asp-101, Gly-107 to Pro-113, Glu-115 to Ser-120, Lys-133 to Pro-143, Gly-172 to Asn- |
| | 194, Val-196 to Gly-216, Phe-221 to Gln-226, Asn-255 to Lys-260, Leu-282 to Lys-290. |
| 840757 | Preferred epitopes include those comprising a sequence shown in SEQ ID NO. 1443 as |
| | residues: Arg-8 to Gln-19, Arg-25 to Lys-38, Pro-91 to Pro-97. |
| 840760 | Preferred epitopes include those comprising a sequence shown in SEQ ID NO. 1445 as |
| | residues: Gly-9 to Thr-14, Tyr-23 to Asp-32, Pro-40 to Pro-46. |
| 840781 | Preferred epitopes include those comprising a sequence shown in SEQ ID NO. 1447 as |
| | residues: Glu-8 to Ser-13, Ser-26 to Lys-33, Lys-45 to Ser-50, Glu-81 to Glu-92, Asn-109 |
| | to Asp-115. |
| 840789 | Preferred epitopes include those comprising a sequence shown in SEQ ID NO. 1448 as |
| | residues: Val-141 to Glu-147, Met-160 to Phe-166, Ser-176 to Asn-183, Arg-203 to Arg- |
| | 210. |
| 840790 | Preferred epitopes include those comprising a sequence shown in SEQ ID NO. 1449 as |
| | residues: Pro-17 to Asn-25. |
| 840791 | Preferred epitopes include those comprising a sequence shown in SEQ ID NO. 1450 as |
| | residues: Ser-62 to Gln-126, Ala-143 to Gly-182. |
| 840798 | Preferred epitopes include those comprising a sequence shown in SEQ ID NO. 1451 as |
| | residues: Ser-87 to Gln-95. |
| 840802 | Preferred epitopes include those comprising a sequence shown in SEQ ID NO. 1452 as |
| | residues: Pro-22 to Glu-30, Lys-73 to Gly-79, Met-133 to Lys-140, Arg-166 to Lys-176. |
| 840803 | Preferred epitopes include those comprising a sequence shown in SEQ ID NO. 1453 as |
| | residues: Ala-3 to Pro-12, Gln-29 to Ile-39, Ser-54 to Glu-72, Glu-79 to Asp-86, Pro-140 to |
| | Asp-147, Lys-161 to Lys-184, Val-188 to Thr-195, Asp-203 to Glu-215, Gln-231 to Phe- |
| | 248, Gly-271 to Thr-281, Ser-290 to Asp-302, Gly-322 to Ser-336, Pro-342 to Leu-347, Lys- |
| | 370 to Arg-394, Ser-424 to Ser-431, Asp-467 to Gln-483, Lys-507 to Ser-519, Phe-522 to |
| | Ser-567, Leu-578 to Gly-583, Thr-593 to Gln-600. |
| 840811 | Preferred epitopes include those comprising a sequence shown in SEQ ID NO. 1455 as |
| | residues: Ser-10 to Gln-25, Pro-108 to Lys-124. |
| 840814 | Preferred epitopes include those comprising a sequence shown in SEQ ID NO. 1457 as |
| | residues: Gln-29 to Arg-36. |
| 840825 | Preferred epitopes include those comprising a sequence shown in SEQ ID NO. 1459 as |
| | residues: Ala-1 to Arg-10. |
| 840827 | Preferred epitopes include those comprising a sequence shown in SEQ ID NO. 1461 as |
| | residues: Gly-13 to Gly-18, Pro-34 to Thr-45, Ser-47 to Asp-56, Ser-61 to Ser-73, Gly-81 to |
| | Gly-89, Gly-96 to Arg-102, Asp-118 to Glu-123, Thr-126 to Ala-132, Glu-178 to Glu-184, |
| | Glu-254 to Gly-260. |
| 840828 | Preferred epitopes include those comprising a sequence shown in SEQ ID NO. 1462 as |
| | residues: Trp-53 to Asn-59, Thr-106 to Thr-111. |
| 840829 | Preferred epitopes include those comprising a sequence shown in SEQ ID NO. 1463 as |
| | residues: Pro-16 to Thr-23, Val-67 to Asn-73. |
| 840831 | Preferred epitopes include those comprising a sequence shown in SEQ ID NO. 1464 as |
| | residues: Thr-34 to Leu-42, Pro-82 to Tyr-88. |
| 840837 | Preferred epitopes include those comprising a sequence shown in SEQ ID NO. 1466 as |
| | residues: Phe-39 to Ala-44, Lys-67 to Gln-77. |
| 840838 | Preferred epitopes include those comprising a sequence shown in SEQ ID NO. 1467 as |
| | residues: Arg-2 to Gly-9, Arg-38 to Lys-46, Ser-53 to Ser-73, Asp-79 to Ala-84, Leu-129 to |
| | Glu-136, Glu-202 to Arg-210, Glu-216 to Ala-231, Glu-234 to Glu-254, Lys-259 to Leu- |
| | 265. |
| 840842 | Preferred epitopes include those comprising a sequence shown in SEQ ID NO. 1469 as |
| | residues: Phe-20 to Gly-25, Pro-73 to His-81, Pro-84 to Gly-90, Ser-94 to Arg-100. |
| 840843 | Preferred epitopes include those comprising a sequence shown in SEQ ID NO. 1470 as |
| | residues: Gln-45 to Arg-55, Glu-74 to Leu-79, Lys-97 to Lys-103, Arg-108 to Lys-114, |
| | Asp-124 to Asp-138, His-153 to Gly-174, Lys-205 to Ala-223, Glu-230 to Arg-241, Glu-249 |
| | to Arg-256. |
| 840845 | Preferred epitopes include those comprising a sequence shown in SEQ ID NO. 1471 as |
| | residues: Pro-29 to Trp-37, Pro-39 to Arg-44, Thr-51 to Trp-56, Ala-63 to Pro-73. |
| 840851 | Preferred epitopes include those comprising a sequence shown in SEQ ID NO. 1473 as |
| | residues: Thr-23 to Glu-30, Gly-34 to Pro-51, Ser-53 to Pro-65, Lys-68 to Asp-85, Gly-97 |
| | to Gly-105, Ser-150 to Leu-163, Gln-205 to Thr-216, Thr-221 to Ser-227, Pro-237 to Leu- |
| | 242, Val-258 to Asn-269, Glu-280 to Phe-291, Gly-295 to Pro-302, Gly-324 to Pro-332, Ser- |
| | 342 to Ala-353, Arg-388 to Thr-426, Ser-432 to Tyr-439, Ala-452 to Gly-510, Glu-512 to |
| | Pro-524. |
| 840854 | Preferred epitopes include those comprising a sequence shown in SEQ ID NO. 1475 as |
| | residues: Met-37 to Arg-43. |
| 840858 | Preferred epitopes include those comprising a sequence shown in SEQ ID NO. 1476 as |
| | residues: Glu-37 to Lys-51, Thr-85 to Gly-91, Ser-115 to Trp-121, Tyr-177 to Asn-186. |
| 840859 | Preferred epitopes include those comprising a sequence shown in SEQ ID NO. 1477 as |
| | residues: Asp-1 to Gln-7, Met-27 to Val-34. |
| 840863 | Preferred epitopes include those comprising a sequence shown in SEQ ID NO. 1478 as |
| | residues: Lys-41 to Ala-51. |
| 840868 | Preferred epitopes include those comprising a sequence shown in SEQ ID NO. 1479 as |
| | residues: Ala-3 to Trp-16, Lys-63 to Asn-72, Gln-112 to Leu-121, Leu-153 to Asp-159, |
| | Ala-163 to Leu-168, His-180 to Asp-187, Asp-347 to Gly-352, Met-356 to Ser-364, Pro-390 |
| | to Lys-401, Ala-519 to Thr-541, Arg-549 to Lys-554. |
| 840869 | Preferred epitopes include those comprising a sequence shown in SEQ ID NO. 1480 as |
| | residues: Pro-6 to Asp-12, Arg-28 to Thr-37, Ile-50 to Lys-59, Ala-63 to Gly-70, Pro-89 to |
| | Tyr-96, Ser-103 to Ile-111, Thr-114 to Phe-121, Asp-141 to Pro-147, Arg-162 to Thr-172. |
| 840870 | Preferred epitopes include those comprising a sequence shown in SEQ ID NO. 1481 as |
| | residues: Pro-18 to Gly-24. |
| 840875 | Preferred epitopes include those comprising a sequence shown in SEQ ID NO. 1482 as |
| | residues: Thr-29 to Asn-37, Val-58 to Thr-63, Glu-114 to Glu-120, Thr-177 to Leu-184, |
| | Leu-196 to Ser-205. |
| 840876 | Preferred epitopes include those comprising a sequence shown in SEQ ID NO. 1483 as |
| | residues: Gln-2 to Thr-7, Phe-119 to Trp-125, Thr-141 to Cys-147, Asn-210 to Gly-216, |
| | Thr-248 to Val-255, Pro-291 to Arg-296, Asp-308 to Asp-316, Glu-327 to Lys-335, Ser-341 |
| | to Thr-346. |
| 840881 | Preferred epitopes include those comprising a sequence shown in SEQ ID NO. 1484 as |
| | residues: Asp-1 to Pro-14, Met-24 to Val-42, Lys-44 to Ser-60, Tyr-107 to Thr-114. |
| 840883 | Preferred epitopes include those comprising a sequence shown in SEQ ID NO. 1485 as |
| | residues: Pro-28 to Cys-35, Glu-37 to Gln-43, Arg-51 to Arg-58, Gly-79 to Gly-85. |
| 840886 | Preferred epitopes include those comprising a sequence shown in SEQ ID NO. 1486 as |
| | residues: Arg-1 to Ser-6, Gln-45 to Gln-51. |
| 840887 | Preferred epitopes include those comprising a sequence shown in SEQ ID NO. 1487 as |
| | residues: Asn-77 to Met-83. |
| 840891 | Preferred epitopes include those comprising a sequence shown in SEQ ID NO. 1488 as |
| | residues: Gln-1 to His-8, Arg-16 to Gln-25, Thr-32 to Ser-42. |
| 840892 | Preferred epitopes include those comprising a sequence shown in SEQ ID NO. 1489 as |
| | residues: Pro-19 to Val-29, Lys-31 to Tyr-48. |
| 840894 | Preferred epitopes include those comprising a sequence shown in SEQ ID NO. 1490 as |
| | residues: Pro-48 to Leu-55, Ser-65 to Gly-70, His-93 to His-126, Ile-128 to Glu-146, Leu- |
| | 151 to Trp-159, Trp-161 to Pro-170, His-177 to Ala-182. |
| 840896 | Preferred epitopes include those comprising a sequence shown in SEQ ID NO. 1491 as |
| | residues: Thr-37 to Ser-51. |
| 840897 | Preferred epitopes include those comprising a sequence shown in SEQ ID NO. 1492 as |
| | residues: Ser-8 to Gly-13, Cys-32 to Ser-39, Cys-59 to Gly-64, Arg-72 to Gly-78, Leu-91 to |
| | Glu-104, Gly-118 to Glu-123, Asn-140 to Gln-149, Leu-157 to Ile-173, Glu-188 to Gln-209, |
| | Asn-222 to Lys-244, Gln-294 to Ile-300, Glu-336 to Val-342, Leu-346 to Lys-355. |
| 840898 | Preferred epitopes include those comprising a sequence shown in SEQ ID NO. 1493 as |
| | residues: Ala-1 to Thr-6. |
| 840904 | Preferred epitopes include those comprising a sequence shown in SEQ ID NO. 1494 as |
| | residues: Arg-7 to Gly-18, Asn-33 to Trp-40, Leu-48 to Thr-54, Pro-101 to Ala-106, Lys- |
| | 119 to Val-126, Lys-169 to Leu-175, Gln-205 to Asp-216, Met-232 to Val-239, Arg-241 to |
| | Glu-252, Glu-260 to Pro-276, Ser-284 to Ile-291. |
| 840905 | Preferred epitopes include those comprising a sequence shown in SEQ ID NO. 1495 as |
| | residues: Pro-17 to Ala-29, Leu-57 to His-67, Tyr-131 to Gly-137, Val-148 to Ser-153, Leu- |
| | 214 to Gln-225, Ser-242 to Ser-247, Gly-261 to Ser-267, Arg-281 to Pro-286, Thr-299 to |
| | Lys-304, Ile-314 to Val-320, Lys-348 to Thr-366. |
| 840908 | Preferred epitopes include those comprising a sequence shown in SEQ ID NO. 1496 as |
| | residues: Phe-49 to Glu-58, Leu-71 to Pro-85, Gln-105 to Leu-110, Thr-153 to Glu-158, |
| | Glu-168 to Ser-173, Asn-192 to Lys-197, Gln-207 to Asn-264, Pro-292 to Lys-299, Gln-331 |
| | to Leu-337, Ser-355 to Gly-362, Asp-381 to Gly-387, Val-396 to Asp-403, Thr-411 to His- |
| | 416, Arg-451 to Gly-457, Glu-464 to Ala-469, Asn-492 to Gly-509, Tyr-518 to Thr-526, |
| | Glu-562 to Ser-567. |
| 840909 | Preferred epitopes include those comprising a sequence shown in SEQ ID NO. 1497 as |
| | residues: Pro-15 to Gly-29, Arg-34 to Ser-52. |
| 840910 | Preferred epitopes include those comprising a sequence shown in SEQ ID NO. 1498 as |
| | residues: Arg-26 to Met-31. |
| 840912 | Preferred epitopes include those comprising a sequence shown in SEQ ID NO. 1499 as |
| | residues: Ala-14 to His-19, Gln-31 to Thr-39, Phe-55 to Cys-60. |
| 840916 | Preferred epitopes include those comprising a sequence shown in SEQ ID NO. 1500 as |
| | residues: Gly-7 to Leu-13. |
| 840917 | Preferred epitopes include those comprising a sequence shown in SEQ ID NO. 1501 as |
| | residues: Ile-20 to Cys-26. |
| 840918 | Preferred epitopes include those comprising a sequence shown in SEQ ID NO. 1502 as |
| | residues: Glu-59 to Thr-69, Thr-89 to Glu-96, Met-103 to Thr-110, Tyr-168 to Lys-176, |
| | Asn-196 to Ile-201, Thr-226 to Phe-235, Asp-244 to Glu-252, Lys-282 to Ser-290, Thr-325 |
| | to Thr-339, Lys-357 to Lys-362, Asn-397 to Tyr-403. |
| 840922 | Preferred epitopes include those comprising a sequence shown in SEQ ID NO. 1503 as |
| | residues: Phe-1 to Lys-7. |
| 840927 | Preferred epitopes include those comprising a sequence shown in SEQ ID NO. 1505 as |
| | residues: Cys-52 to Lys-57. |
| 840928 | Preferred epitopes include those comprising a sequence shown in SEQ ID NO. 1506 as |
| | residues: Arg-2 to Thr-7, Gln-65 to Trp-73, Glu-103 to Glu-110, Glu-219 to Asn-227, Glu- |
| | 309 to Trp-320, Asp-389 to Asp-394. |
| 840929 | Preferred epitopes include those comprising a sequence shown in SEQ ID NO. 1507 as |
| | residues: Pro-1 to Arg-7, Asp-21 to Lys-43, Lys-48 to Arg-53, Gln-59 to Gln-75, Pro-81 to |
| | Ala-86, Asp-127 to Lys-143, Glu-191 to Arg-197. |
| 840930 | Preferred epitopes include those comprising a sequence shown in SEQ ID NO. 1508 as |
| | residues: Phe-1 to Cys-8, Ala-10 to Gly-23, Gln-114 to Lys-120, Glu-129 to Phe-135, Ile- |
| | 155 to Gln-160, Ser-193 to Thr-199, Asp-214 to Gly-226, Asp-236 to Gly-245, Ala-283 to |
| | Arg-288, Ala-322 to Asp-331. |
| 840931 | Preferred epitopes include those comprising a sequence shown in SEQ ID NO. 1509 as |
| | residues: Leu-28 to Asp-35, Leu-59 to Ser-65, Glu-111 to Lys-117, Gln-131 to Ala-137. |
| 840941 | Preferred epitopes include those comprising a sequence shown in SEQ ID NO. 1510 as |
| | residues: Pro-16 to Ser-26, Arg-41 to Gly-49, Glu-51 to Arg-64, Tyr-69 to Phe-77, Thr-82 |
| | to Asp-90, Asp-168 to Gln-173, Lys-240 to Tyr-248. |
| 840944 | Preferred epitopes include those comprising a sequence shown in SEQ ID NO. 1511 as |
| | residues: Gln-1 to Asp-10, Pro-104 to Glu-113, Pro-136 to Ala-142, Asn-152 to Lys-161. |
| 840948 | Preferred epitopes include those comprising a sequence shown in SEQ ID NO. 1513 as |
| | residues: Ala-21 to His-26, Pro-41 to Gln-46, Lys-56 to Glu-66. |
| 840953 | Preferred epitopes include those comprising a sequence shown in SEQ ID NO. 1515 as |
| | residues: Gly-1 to Ser-8, Arg-10 to Ser-15, Leu-17 to Gly-22, Lys-115 to Ala-130, Tyr-149 |
| | to Gly-156, Asn-181 to Glu-190, Glu-252 to Glu-257, Ser-339 to Asp-347, Leu-356 to Leu- |
| | 361, Ser-387 to Lys-395, Thr-470 to Ile-476. |
| 840954 | Preferred epitopes include those comprising a sequence shown in SEQ ID NO. 1516 as |
| | residues: Pro-12 to Phe-17, Asn-40 to Lys-55, Ser-105 to Thr-112, Lys-154 to Trp-168, |
| | Arg-176 to Phe-184, Leu-216 to Thr-224, Leu-237 to Val-242, Ala-365 to Val-370, Pro-379 |
| | to Gly-386, Leu-424 to Gly-430, Tyr-439 to Ser-451, Lys-459 to Tyr-464, Arg-595 to Asn- |
| | 606, Asp-613 to Asn-621. |
| 840958 | Preferred epitopes include those comprising a sequence shown in SEQ ID NO. 1517 as |
| | residues: Ala-1 to Lys-14, Glu-18 to Lys-40, Pro-61 to Thr-68, Pro-70 to Gln-78, Tyr-82 to |
| | Gly-90. |
| 840960 | Preferred epitopes include those comprising a sequence shown in SEQ ID NO. 1518 as |
| | residues: Pro-42 to Asp-47, Thr-53 to Pro-59. |
| 840968 | Preferred epitopes include those comprising a sequence shown in SEQ ID NO. 1519 as |
| | residues: Gln-5 to Glu-11. |
| 840969 | Preferred epitopes include those comprising a sequence shown in SEQ ID NO. 1520 as |
| | residues: Glu-40 to His-45, Tyr-59 to Gly-68, Pro-107 to Pro-112, Leu-116 to Thr-121, |
| | Asp-139 to Lys-152. |
| 840978 | Preferred epitopes include those comprising a sequence shown in SEQ ID NO. 1524 as |
| | residues: Ile-14 to Asp-19. |
| 840980 | Preferred epitopes include those comprising a sequence shown in SEQ ID NO. 1525 as |
| | residues: Leu-1 to Pro-9, Val-13 to Val-41, Glu-79 to Met-86, Gln-89 to Lys-97, Glu-116 to |
| | Lys-128, Ser-130 to Gln-136, Arg-152 to Gly-158, Cys-161 to Lys-171, Pro-173 to Ala-182, |
| | Cys-184 to Ala-190, Leu-200 to Ser-206, Pro-225 to Leu-252. |
| 840982 | Preferred epitopes include those comprising a sequence shown in SEQ ID NO. 1526 as |
| | residues: Pro-1 to Cys-9, Lys-27 to Ser-32, Glu-58 to Val-63, Ser-78 to Val-83. |
| 840985 | Preferred epitopes include those comprising a sequence shown in SEQ ID NO. 1527 as |
| | residues: Asn-6 to Leu-17, Met-23 to Asp-33, His-56 to Gln-69, Arg-82 to Asp-89, Arg-92 |
| | to Lys-97, Ala-99 to Arg-104, Glu-140 to Asp-146, Ser-173 to Tyr-178, Cys-189 to Leu- |
| | 194, Val-239 to Asn-245, Glu-266 to Arg-276. |
| 840989 | Preferred epitopes include those comprising a sequence shown in SEQ ID NO. 1528 as |
| | residues: Asn-72 to Ile-78, Gly-102 to Asp-109, Arg-150 to Trp-158, Phe-255 to Pro-266, |
| | Glu-272 to Lys-277. |
| 840991 | Preferred epitopes include those comprising a sequence shown in SEQ ID NO. 1529 as |
| | residues: Thr-10 to Ala-17, His-24 to Leu-30, Ala-128 to Val-136. |
| 840996 | Preferred epitopes include those comprising a sequence shown in SEQ ID NO. 1530 as |
| | residues: Cys-107 to Gln-112, Lys-142 to Ser-148. |
| 840997 | Preferred epitopes include those comprising a sequence shown in SEQ ID NO. 1531 as |
| | residues: Ile-25 to Pro-35, Asp-37 to Thr-42, Ala-56 to Phe-71, Arg-75 to Gln-82, Thr-127 |
| | to Tyr-139. |
| 840998 | Preferred epitopes include those comprising a sequence shown in SEQ ID NO. 1532 as |
| | residues: Lys-19 to Thr-24, Pro-35 to Gln-130. |
| 840999 | Preferred epitopes include those comprising a sequence shown in SEQ ID NO. 1533 as |
| | residues: Phe-44 to Arg-53. |
| 841000 | Preferred epitopes include those comprising a sequence shown in SEQ ID NO. 1534 as |
| | residues: Ala-4 to Pro-13. |
| 841002 | Preferred epitopes include those comprising a sequence shown in SEQ ID NO. 1535 as |
| | residues: Pro-8 to Ser-15, His-27 to Ser-39, Pro-50 to Gly-59. |
| 841003 | Preferred epitopes include those comprising a sequence shown in SEQ ID NO. 1536 as |
| | residues: Pro-24 to Glu-31. |
| 841008 | Preferred epitopes include those comprising a sequence shown in SEQ ID NO. 1537 as |
| | residues: Cys-10 to Cys-16, Thr-114 to Gly-120, Asn-200 to Lys-209. |
| 841013 | Preferred epitopes include those comprising a sequence shown in SEQ ID NO. 1538 as |
| | residues: Phe-58 to Asn-66, Ala-82 to Gln-88, Ser-169 to Glu-178, Pro-222 to Gly-227, |
| | Glu-283 to Glu-289, Ala-314 to Gly-321, Ile-370 to Asn-376, Lys-409 to Ala-423, Asp-444 |
| | to Arg-449, Ser-456 to Glu-463, Asn-472 to Asn-477. |
| 841014 | Preferred epitopes include those comprising a sequence shown in SEQ ID NO. 1539 as |
| | residues: Asn-8 to Phe-17, Gly-58 to Asp-64, Glu-186 to Ser-191, Ala-266 to Ile-271, Thr- |
| | 300 to Lys-309, Val-327 to Met-332. |
| 841015 | Preferred epitopes include those comprising a sequence shown in SEQ ID NO. 1540 as |
| | residues: Tyr-17 to Thr-29, Lys-35 to Glu-40. |
| 841019 | Preferred epitopes include those comprising a sequence shown in SEQ ID NO. 1542 as |
| | residues: Phe-9 to Phe-16. |
| 841024 | Preferred epitopes include those comprising a sequence shown in SEQ ID NO. 1543 as |
| | residues: Ser-6 to Gly-15, Ala-90 to Gly-96, Val-119 to Trp-127, Val-147 to Lys-155, Ala- |
| | 174 to Glu-181, Ala-231 to Leu-239. |
| 841025 | Preferred epitopes include those comprising a sequence shown in SEQ ID NO. 1544 as |
| | residues: Leu-18 to His-27, Asp-29 to Ser-42, Glu-62 to Asn-72, Ser-76 to Glu-81. |
| 841026 | Preferred epitopes include those comprising a sequence shown in SEQ ID NO. 1545 as |
| | residues: Ala-3 to Gly-10, Lys-41 to Gly-48, Pro-69 to Ser-81, Pro-92 to Thr-97, Asn-101 |
| | to Lys-110, Gly-173 to Gly-182, Arg-188 to Asn-199. |
| 841027 | Preferred epitopes include those comprising a sequence shown in SEQ ID NO. 1546 as |
| | residues: Pro-1 to Arg-19, Asp-42 to Glu-48, Asp-70 to Tyr-79, Asn-81 to Gly-88, Ala-91 |
| | to Gly-98, Glu-153 to Pro-163. |
| 841029 | Preferred epitopes include those comprising a sequence shown in SEQ ID NO. 1547 as |
| | residues: Arg-50 to Ser-58, Arg-66 to Asp-73, Pro-96 to Ser-102, Gln-133 to Arg-142. |
| 841030 | Preferred epitopes include those comprising a sequence shown in SEQ ID NO. 1548 as |
| | residues: Ser-23 to Gln-30. |
| 841034 | Preferred epitopes include those comprising a sequence shown in SEQ ID NO. 1550 as |
| | residues: Ser-56 to Lys-61. |
| 841036 | Preferred epitopes include those comprising a sequence shown in SEQ ID NO. 1551 as |
| | residues: Leu-89 to Lys-102. |
| 841039 | Preferred epitopes include those comprising a sequence shown in SEQ ID NO. 1552 as |
| | residues: Glu-19 to Ser-24, Ser-52 to Gly-60, Ser-67 to Gly-74, Lys-142 to Gly-148, Pro- |
| | 178 to Arg-184. |
| 841048 | Preferred epitopes include those comprising a sequence shown in SEQ ID NO. 1554 as |
| | residues: Met-22 to Tyr-49, Arg-60 to Thr-69, Gln-93 to Glu-111, Pro-113 to Glu-139, His- |
| | 152 to Ser-162, Lys-172 to Glu-178, Ser-183 to Ile-188, Asn-191 to Arg-201, Arg-251 to |
| | Asn-259, Thr-297 to Arg-303, Val-379 to Gln-401, Ser-407 to Pro-414, Thr-428 to Lys-446. |
| 841050 | Preferred epitopes include those comprising a sequence shown in SEQ ID NO. 1556 as |
| | residues: Ile-6 to Asn-15. |
| 841052 | Preferred epitopes include those comprising a sequence shown in SEQ ID NO. 1557 as |
| | residues: Pro-37 to Arg-42, Asn-83 to Phe-90, Lys-187 to Cys-192, Asp-209 to Gly-215, |
| | His-236 to Lys-243, Tyr-263 to Gly-276, Thr-308 to Gly-314, Glu-346 to Asp-351. |
| 841054 | Preferred epitopes include those comprising a sequence shown in SEQ ID NO. 1558 as |
| | residues: Pro-8 to Glu-18, Ala-47 to Gly-53. |
| 841055 | Preferred epitopes include those comprising a sequence shown in SEQ ID NO. 1559 as |
| | residues: Val-13 to Leu-31. |
| 841056 | Preferred epitopes include those comprising a sequence shown in SEQ ID NO. 1560 as |
| | residues: Arg-8 to Phe-13, Arg-29 to Val-36. |
| 841060 | Preferred epitopes include those comprising a sequence shown in SEQ ID NO. 1561 as |
| | residues: Asp-69 to Gln-74. |
| 841062 | Preferred epitopes include those comprising a sequence shown in SEQ ID NO. 1563 as |
| | residues: Gly-1 to Lys-6, Thr-10 to Lys-16, Asp-22 to Pro-35, Pro-62 to Asp-77, Ile-85 to |
| | Met-97, Leu-130 to Thr-135, Lys-206 to Gly-213, Leu-234 to Ser-242, Leu-334 to Glu-341, |
| | Ser-354 to Lys-369, Glu-398 to Lys-409, Glu-425 to Glu-477. |
| 841063 | Preferred epitopes include those comprising a sequence shown in SEQ ID NO. 1564 as |
| | residues: Ala-1 to Trp-12, Glu-49 to Gly-56, Lys-99 to Thr-110, Glu-147 to Lys-154. |
| 841067 | Preferred epitopes include those comprising a sequence shown in SEQ ID NO. 1565 as |
| | residues: Ser-7 to Ala-12, Gly-14 to Met-30, Lys-52 to Ala-58. |
| 841074 | Preferred epitopes include those comprising a sequence shown in SEQ ID NO. 1566 as |
| | residues: Ala-1 to Gln-6, Glu-22 to Arg-30, Leu-43 to Ser-52, Glu-61 to Lys-70, Lys-75 to |
| | Glu-84, Thr-105 to Lys-110, Asp-131 to Ala-143, Ser-151 to Thr-158, Thr-200 to Asp-208. |
| 841076 | Preferred epitopes include those comprising a sequence shown in SEQ ID NO. 1567 as |
| | residues: Lys-1 to Gly-6, Asp-13 to Glu-27. |
| 841083 | Preferred epitopes include those comprising a sequence shown in SEQ ID NO. 1569 as |
| | residues: Leu-42 to Lys-49, Glu-63 to Ser-68, Glu-93 to Gln-98, Asn-109 to Ser-115, Met- |
| | 147 to Lys-152. |
| 841093 | Preferred epitopes include those comprising a sequence shown in SEQ ID NO. 1571 as |
| | residues: Pro-5 to Glu-14, Ala-84 to His-90, Thr-93 to Gly-99, Asn-124 to Val-133, Met- |
| | 144 to Val-149, Thr-192 to Glu-200. |
| 841097 | Preferred epitopes include those comprising a sequence shown in SEQ ID NO. 1572 as |
| | residues: Pro-46 to Glu-56, Phe-65 to Ser-73, Glu-114 to Asp-121, Thr-132 to Gln-139, |
| | Asp-171 to Pro-177, Thr-215 to Val-221. |
| 841098 | Preferred epitopes include those comprising a sequence shown in SEQ ID NO. 1573 as |
| | residues: Arg-9 to Gly-14, Met-36 to Lys-57, Pro-93 to Gly-98. |
| 841113 | Preferred epitopes include those comprising a sequence shown in SEQ ID NO. 1575 as |
| | residues: Gln-10 to Gly-18. |
| 841115 | Preferred epitopes include those comprising a sequence shown in SEQ ID NO. 1576 as |
| | residues: Ile-1 to Lys-13, Thr-36 to Ala-42, Asn-49 to Leu-55, Phe-59 to Arg-70, Asp-80 to |
| | Arg-86, Lys-92 to Lys-98. |
| 841117 | Preferred epitopes include those comprising a sequence shown in SEQ ID NO. 1578 as |
| | residues: Arg-1 to Glu-26, Thr-59 to Glu-64, Gln-69 to Met-77, Arg-79 to Ser-84, Pro-86 to |
| | Pro-97, Arg-104 to Lys-121, Ala-133 to Arg-141, Leu-162 to Ser-169. |
| 841127 | Preferred epitopes include those comprising a sequence shown in SEQ ID NO. 1580 as |
| | residues: Pro-1 to Pro-12, Arg-51 to Ile-56, Lys-69 to Arg-85, Glu-115 to Arg-122, Gly-129 |
| | to Gln-134, Lys-138 to Lys-156, Gly-163 to Pro-170. |
| 841128 | Preferred epitopes include those comprising a sequence shown in SEQ ID NO. 1581 as |
| | residues: Pro-75 to Glu-91, Glu-121 to Gly-126, Ile-149 to Lys-155, Ala-185 to Asp-201, |
| | Glu-237 to Gly-252, Leu-256 to Ser-276. |
| 841134 | Preferred epitopes include those comprising a sequence shown in SEQ ID NO. 1584 as |
| | residues: Lys-43 to Leu-48, Lys-54 to Ala-62, Asn-75 to Ala-82, Glu-135 to Asp-140, Glu- |
| | 173 to Leu-178, Lys-213 to Tyr-222. |
| 841138 | Preferred epitopes include those comprising a sequence shown in SEQ ID NO. 1587 as |
| | residues: Arg-68 to Gln-74, Ser-85 to Asp-115, Arg-133 to Lys-144, Arg-152 to Ile-165, |
| | Pro-184 to Lys-191, Leu-198 to Lys-215, Val-235 to Glu-240, Asp-246 to Asn-266, Glu-284 |
| | to Pro-292. |
| 841141 | Preferred epitopes include those comprising a sequence shown in SEQ ID NO. 1589 as |
| | residues: Pro-16 to Glu-27, Pro-36 to Phe-43, Asn-71 to Ser-84, Thr-107 to Ser-115, Glu- |
| | 147 to Lys-161, Pro-167 to Ser-185, Ser-187 to Ser-206. |
| 841145 | Preferred epitopes include those comprising a sequence shown in SEQ ID NO. 1591 as |
| | residues: Glu-33 to Pro-40, Arg-48 to Pro-56, Met-71 to Gly-76, Ser-103 to Arg-115. |
| 841146 | Preferred epitopes include those comprising a sequence shown in SEQ ID NO. 1592 as |
| | residues: Lys-21 to Thr-26, Thr-37 to Pro-42. |
| 841150 | Preferred epitopes include those comprising a sequence shown in SEQ ID NO. 1593 as |
| | residues: Ser-56 to Thr-62. |
| 841153 | Preferred epitopes include those comprising a sequence shown in SEQ ID NO. 1594 as |
| | residues: Glu-4 to Trp-9. |
| 841154 | Preferred epitopes include those comprising a sequence shown in SEQ ID NO. 1595 as |
| | residues: Asp-24 to Tyr-29, Ser-34 to Asn-42, Leu-45 to Lys-61, Thr-117 to Ser-124, Lys- |
| | 153 to Asp-158, Glu-174 to Lys-150, Leu-188 to Gly-204, Ala-220 to Leu-227, Gly-262 to |
| | His-268, Lys-276 to Thr-287, Phe-307 to Pro-319, Thr-345 to Met-351, Gln-427 to Ala-432, |
| | Asp-438 to Gln-443. |
| 841156 | Preferred epitopes include those comprising a sequence shown in SEQ ID NO. 1596 as |
| | residues: Glu-4 to Gly-12, Thr-21 to Gln-27, Pro-40 to Ser-47, Pro-50 to Ser-61, Val-101 to |
| | Cys-107, Lys-138 to Gly-147, Gln-150 to Tyr-156, Lys-169 to Thr-174. |
| 841157 | Preferred epitopes include those comprising a sequence shown in SEQ ID NO. 1597 as |
| | residues: Val-35 to Ala-41, Gln-56 to Trp-70. |
| 841159 | Preferred epitopes include those comprising a sequence shown in SEQ ID NO. 1598 as |
| | residues: Gln-1 to Arg-7, Arg-14 to Glu-22, Ala-43 to Asp-55, Thr-65 to Arg-71. |
| 841164 | Preferred epitopes include those comprising a sequence shown in SEQ ID NO. 1599 as |
| | residues: Arg-1 to Cys-11, Arg-18 to Arg-25, Glu-83 to Glu-88, Gly-108 to Lys-113. |
| 841167 | Preferred epitopes include those comprising a sequence shown in SEQ ID NO. 1600 as |
| | residues: Arg-16 to Asp-22. |
| 841170 | Preferred epitopes include those comprising a sequence shown in SEQ ID NO. 1601 as |
| | residues: Ala-1 to Ala-14, Ala-37 to Asp-45, Thr-55 to Leu-62, Glu-76 to Gly-82, Ile-101 to |
| | Gly-110, Pro-119 to Gly-127, Pro-129 to Asp-142, Lys-196 to Ser-210, Pro-216 to Tyr-246. |
| 841173 | Preferred epitopes include those comprising a sequence shown in SEQ ID NO. 1602 as |
| | residues: Arg-52 to Gln-57, Asp-181 to Gly-187, Ser-260 to Val-271, Lys-285 to Asp-290. |
| 841178 | Preferred epitopes include those comprising a sequence shown in SEQ ID NO. 1604 as |
| | residues: Ser-1 to Ala-9, Ala-14 to Ile-30, Pro-41 to Ser-50, Asn-56 to Arg-63, Asp-95 to |
| | Lys-102, Pro-126 to Ser-132. |
| 841181 | Preferred epitopes include those comprising a sequence shown in SEQ ID NO. 1606 as |
| | residues: Thr-3 to Arg-12. |
| 841182 | Preferred epitopes include those comprising a sequence shown in SEQ ID NO. 1607 as |
| | residues: Gly-12 to Gln-26, Cys-34 to Gly-49, Glu-86 to Tyr-93, Phe-103 to Thr-139, Asp- |
| | 145 to Gln-153, Tyr-167 to Arg-176, Ser-192 to Gly-200, Ala-219 to Gly-226, Glu-234 to |
| | Trp-242. |
| 841187 | Preferred epitopes include those comprising a sequence shown in SEQ ID NO. 1609 as |
| | residues: Glu-1 to Gly-15, Pro-23 to Val-48, Pro-58 to Glu-63, Thr-79 to Trp-91, Asn-203 |
| | to Lys-213. |
| 841188 | Preferred epitopes include those comprising a sequence shown in SEQ ID NO. 1610 as |
| | residues: Arg-1 to Gly-7, Ile-92 to Tyr-98, Arg-153 to Gly-159, Ala-319 to Ser-324, Lys- |
| | 350 to Glu-359. |
| 841189 | Preferred epitopes include those comprising a sequence shown in SEQ ID NO. 1611 as |
| | residues: Arg-13 to Ala-21, Thr-29 to Arg-34, Glu-41 to Ala-50, Ser-65 to Glu-71, Glu-108 |
| | to Glu-117, Ile-144 to Arg-154, Gly-159 to His-186, Lys-189 to Tyr-197. |
| 841192 | Preferred epitopes include those comprising a sequence shown in SEQ ID NO. 1612 as |
| | residues: Gln-56 to Leu-63, Gln-188 to Lys-193, His-200 to Gly-205, Leu-208 to Asn-215, |
| | Thr-358 to Lys-367, Lys-369 to Gln-377, His-426 to Arg-431, Tyr-437 to Glu-446, Glu-459 |
| | to Pro-476. |
| 841194 | Preferred epitopes include those comprising a sequence shown in SEQ ID NO. 1613 as |
| | residues: Phe-54 to Ser-59, Thr-63 to Asp-69. |
| 841195 | Preferred epitopes include those comprising a sequence shown in SEQ ID NO. 1614 as |
| | residues: His-1 to Gln-6, Ala-66 to Gly-79, Leu-88 to Asp-95, Glu-121 to Ile-126, Pro-140 |
| | to Pro-147, Ile-173 to Trp-180, Asn-195 to Tyr-206. |
| 841198 | Preferred epitopes include those comprising a sequence shown in SEQ ID NO. 1615 as |
| | residues: Gln-29 to Arg-34, Thr-65 to Thr-76, Arg-100 to Arg-108, Leu-163 to Ala-173. |
| 841201 | Preferred epitopes include those comprising a sequence shown in SEQ ID NO. 1617 as |
| | residues: Gln-3 to Lys-10, Pro-42 to Pro-50, Ser-66 to Ser-80, Glu-107 to Ala-121. |
| 841202 | Preferred epitopes include those comprising a sequence shown in SEQ ID NO. 1618 as |
| | residues: Ser-11 to Trp-23, Glu-25 to Gly-32, Ala-56 to Gly-67, Glu-80 to Pro-96, Ala-166 |
| | to Leu-177, Asn-222 to His-231, Met-239 to Gly-249, Gly-318 to Pro-338. |
| 841209 | Preferred epitopes include those comprising a sequence shown in SEQ ID NO. 1619 as |
| | residues: Arg-4 to Leu-27, Gln-63 to Leu-82, Pro-168 to Ser-175. |
| 841213 | Preferred epitopes include those comprising a sequence shown in SEQ ID NO. 1621 as |
| | residues: Val-17 to Tyr-22, Cys-32 to Asp-49, Ser-104 to Pro-114. |
| 841219 | Preferred epitopes include those comprising a sequence shown in SEQ ID NO. 1623 as |
| | residues: Leu-10 to Glu-28, Lys-54 to Gln-60. |
| 841222 | Preferred epitopes include those comprising a sequence shown in SEQ ID NO. 1624 as |
| | residues: Ile-9 to Ser-14, Pro-68 to Cys-80, Ser-82 to Thr-87, Ile-136 to His-155, Lys-214 to |
| | Asn-224. |
| 841223 | Preferred epitopes include those comprising a sequence shown in SEQ ID NO. 1625 as |
| | residues: Pro-12 to Glu-17. |
| 841226 | Preferred epitopes include those comprising a sequence shown in SEQ ID NO. 1627 as |
| | residues: Ala-40 to Thr-52. |
| 841227 | Preferred epitopes include those comprising a sequence shown in SEQ ID NO. 1628 as |
| | residues: Val-54 to Asn-60, Glu-81 to Thr-87, Asn-103 to Glu-108, Asn-163 to His-168, |
| | Ile-170 to Tyr-175. |
| 841233 | Preferred epitopes include those comprising a sequence shown in SEQ ID NO. 1632 as |
| | residues: Gly-8 to Gly-20, Ser-51 to Phe-89, Leu-135 to Gln-140, Glu-156 to Tyr-168. |
| 841234 | Preferred epitopes include those comprising a sequence shown in SEQ ID NO. 1633 as |
| | residues: Lys-65 to Phe-70, Asp-99 to Ile-104, Arg-122 to Asp-128, Leu-244 to Ile-250, |
| | Leu-258 to Leu-268, Ala-270 to Lys-286, Lys-310 to Asp-318, Asn-338 to Gln-344, Asp- |
| | 360 to Leu-369, Lys-414 to Gln-422, Glu-435 to Arg-449, Lys-471 to Phe-476, Arg-498 to |
| | Leu-505, Ala-526 to Gly-534, Ala-536 to Pro-559, Pro-586 to Tyr-612, Tyr-624 to Tyr-629, |
| | Gln-639 to Gln-668. |
| 841236 | Preferred epitopes include those comprising a sequence shown in SEQ ID NO. 1634 as |
| | residues: Lys-5 to Pro-18, Glu-24 to Ser-36, Pro-57 to Gly-63. |
| 841239 | Preferred epitopes include those comprising a sequence shown in SEQ ID NO. 1636 as |
| | residues: Arg-1 to Ser-6. |
| 841243 | Preferred epitopes include those comprising a sequence shown in SEQ ID NO. 1638 as |
| | residues: Gln-1 to Asp-7, Pro-26 to Ser-31, Leu-41 to Arg-46, Gly-57 to Thr-65, Lys-71 to |
| | Lys-76. |
| 841248 | Preferred epitopes include those comprising a sequence shown in SEQ ID NO. 1639 as |
| | residues: Ala-8 to Thr-23, Pro-35 to Met-41, Asn-60 to Thr-65, Asn-89 to Glu-94, Pro-161 |
| | to Leu-167, Asp-184 to Trp-189, Phe-192 to Leu-206, Arg-215 to Leu-221. |
| 841250 | Preferred epitopes include those comprising a sequence shown in SEQ ID NO. 1640 as |
| | residues: Asn-13 to Gly-22, Gln-24 to Lys-29, Ser-44 to Gly-51, Thr-128 to Asp-138, Glu- |
| | 166 to Leu-175, Arg-187 to Ala-192, Pro-240 to Ala-256, Ser-259 to Trp-265, Met-281 to |
| | Lys-288, Leu-318 to Trp-356, Ser-379 to Thr-385, Phe-409 to Tyr-419. |
| 841251 | Preferred epitopes include those comprising a sequence shown in SEQ ID NO. 1641 as |
| | residues: Arg-13 to Phe-20, His-22 to Ser-27, Gln-70 to Phe-76. |
| 841254 | Preferred epitopes include those comprising a sequence shown in SEQ ID NO. 1642 as |
| | residues: Thr-1 to Lys-15, Gln-41 to Glu-46. |
| 841263 | Preferred epitopes include those comprising a sequence shown in SEQ ID NO. 1643 as |
| | residues: Ser-27 to Arg-35, Leu-76 to Trp-85, Arg-112 to Thr-118. |
| 841269 | Preferred epitopes include those comprising a sequence shown in SEQ ID NO. 1645 as |
| | residues: Lys-12 to Lys-19. |
| 841273 | Preferred epitopes include those comprising a sequence shown in SEQ ID NO. 1647 as |
| | residues: Tyr-3 to Asn-9. |
| 841277 | Preferred epitopes include those comprising a sequence shown in SEQ ID NO. 1649 as |
| | residues: Pro-55 to Ser-62, Arg-124 to Ile-129, Arg-145 to Asn-151, Asn-186 to Asn-196, |
| | Lys-267 to Lys-274, Arg-368 to Arg-373. |
| 841278 | Preferred epitopes include those comprising a sequence shown in SEQ ID NO. 1650 as |
| | residues: Ala-6 to Pro-13, Asn-19 to Phe-24. |
| 841279 | Preferred epitopes include those comprising a sequence shown in SEQ ID NO. 1651 as |
| | residues: Thr-3 to Gly-12, Arg-19 to Ala-24, Arg-30 to Gly-43, Pro-46 to Trp-51, Gly-77 to |
| | Arg-85. |
| 841280 | Preferred epitopes include those comprising a sequence shown in SEQ ID NO. 1652 as |
| | residues: Ser-14 to Thr-20, Glu-44 to Gly-50, Lys-68 to Pro-76, Glu-91 to Glu-96, Ala-110 |
| | to Lys-116, Lys-124 to His-131, Gly-164 to Gln-173, Leu-191 to Asn-200, Met-215 to Ser- |
| | 221, Gln-236 to Lys-258, Pro-266 to Asn-271, Pro-279 to Asp-286. |
| 841282 | Preferred epitopes include those comprising a sequence shown in SEQ ID NO. 1653 as |
| | residues: Leu-3 to Lys-8. |
| 841283 | Preferred epitopes include those comprising a sequence shown in SEQ ID NO. 1654 as |
| | residues: Tyr-1 to Glu-9, Ala-12 to Ser-18, His-63 to Phe-77, Asn-98 to Arg-110. |
| 841286 | Preferred epitopes include those comprising a sequence shown in SEQ ID NO. 1655 as |
| | residues: Ser-13 to Arg-19, Leu-28 to Val-35, Pro-37 to Gly-57, Ser-81 to Pro-87, Ile-102 to |
| | Arg-111. |
| 841287 | Preferred epitopes include those comprising a sequence shown in SEQ ID NO. 1656 as |
| | residues: Arg-1 to Ala-10, Val-23 to Phe-42, Asp-60 to Tyr-69, Pro-71 to Ser-79. |
| 841288 | Preferred epitopes include those comprising a sequence shown in SEQ ID NO. 1657 as |
| | residues: Ser-4 to Pro-9, Arg-18 to Pro-26. |
| 841291 | Preferred epitopes include those comprising a sequence shown in SEQ ID NO. 1658 as |
| | residues: Lys-16 to Ser-23, Gln-56 to Asp-63, Lys-137 to His-145, Glu-149 to His-156, |
| | Glu-163 to Gly-171, Pro-173 to Ala-180, Lys-189 to Ala-206, Glu-208 to Gln-214, Pro-231 |
| | to Ser-240. |
| 841294 | Preferred epitopes include those comprising a sequence shown in SEQ ID NO. 1660 as |
| | residues: Gly-6 to Gly-12, Glu-19 to Pro-37, Gly-43 to Pro-55, Asp-62 to Gln-78, Arg-89 to |
| | Gln-95, Lys-99 to Arg-118, Glu-123 to Ala-139. |
| 841301 | Preferred epitopes include those comprising a sequence shown in SEQ ID NO. 1663 as |
| | residues: Asn-8 to Arg-13, Gly-36 to Leu-43, Arg-53 to Cys-59. |
| 841303 | Preferred epitopes include those comprising a sequence shown in SEQ ID NO. 1664 as |
| | residues: Pro-23 to Gly-35, Pro-38 to Phe-45, Pro-47 to Gly-56, Val-68 to Tyr-73, Gly-123 |
| | to Gly-135, Met-150 to Gln-164, Arg-212 to Ile-220, Arg-284 to Ile-289, Tyr-296 to His- |
| | 315, Gln-325 to Ile-334, Thr-471 to Arg-476. |
| 841304 | Preferred epitopes include those comprising a sequence shown in SEQ ID NO. 1665 as |
| | residues: Phe-33 to Arg-47, Asn-65 to Gly-71, Asp-95 to Gly-100, Asp-152 to Asn-163, |
| | His-223 to Gly-229. |
| 841305 | Preferred epitopes include those comprising a sequence shown in SEQ ID NO. 1666 as |
| | residues: Gly-5 to Trp-19, Pro-21 to Ser-35, Pro-42 to Ser-58, Pro-64 to Asp-75. |
| 841309 | Preferred epitopes include those comprising a sequence shown in SEQ ID NO. 1667 as |
| | residues: Lys-1 to Lys-6, Lys-18 to Asp-25, Thr-46 to Arg-64, His-97 to Lys-104, Glu-113 |
| | to Ala-118, Asn-126 to Gly-137, Thr-142 to Pro-147, Glu-155 to Ile-173, Ala-175 to Asn- |
| | 184, Ser-188 to Glu-222, Glu-228 to Ala-242, Ala-263 to Asp-272, Thr-277 to Asp-288, |
| | Lys-293 to Met-308, Ile-348 to Gly-359, Pro-361 to Thr-386, Pro-403 to Arg-411, Asp-466 |
| | to Gln-473, Arg-479 to Thr-493, Lys-507 to Lys-513. |
| 841314 | Preferred epitopes include those comprising a sequence shown in SEQ ID NO. 1668 as |
| | residues: Leu-4 to Ala-11, Phe-106 to Trp-112, Lys-204 to Ile-209, Ser-224 to Leu-236, |
| | Pro-254 to Ser-262, Phe-282 to Met-295. |
| 841316 | Preferred epitopes include those comprising a sequence shown in SEQ ID NO. 1669 as |
| | residues: Pro-60 to Ser-67, Lys-86 to Ile-92, Arg-125 to Lys-130, Glu-155 to Asp-161, Glu- |
| | 170 to Ser-176, Thr-181 to Val-187, Leu-198 to Asn-203, Gln-258 to Lys-263, Pro-271 to |
| | Asn-276, Phe-286 to Glu-292. |
| 841318 | Preferred epitopes include those comprising a sequence shown in SEQ ID NO. 1670 as |
| | residues: Pro-14 to Trp-25, His-36 to Arg-41, Gly-66 to Tyr-73, Glu-82 to Pro-89. |
| 841321 | Preferred epitopes include those comprising a sequence shown in SEQ ID NO. 1671 as |
| | residues: Asp-11 to Gly-19, Asp-26 to Val-31, Ala-52 to Asn-71, Gly-75 to Gly-81, Pro-88 |
| | to Gly-119, Pro-125 to Pro-180, Gly-187 to Gly-193, Tyr-196 to Tyr-218. |
| 841324 | Preferred epitopes include those comprising a sequence shown in SEQ ID NO. 1672 as |
| | residues: Gly-45 to Val-54, Trp-67 to Gly-75, Asp-82 to Asn-90, Ala-124 to Trp-132, Thr- |
| | 139 to Gln-145. |
| 841326 | Preferred epitopes include those comprising a sequence shown in SEQ ID NO. 1673 as |
| | residues: Thr-45 to Asn-50, Lys-60 to Arg-73, Arg-81 to Asp-87, Lys-91 to Ser-96, Pro-105 |
| | to Gly-114, Ser-130 to Leu-136, Leu-145 to Ile-154, Cys-279 to Pro-284, Thr-321 to Glu- |
| | 326, Pro-389 to Thr-398, Ala-406 to Ile-412, Ala-431 to Glu-438, Lys-495 to Glu-500, Asn- |
| | 520 to Val-526, Glu-541 to Asn-547, Thr-552 to Tyr-557. |
| 841328 | Preferred epitopes include those comprising a sequence shown in SEQ ID NO. 1674 as |
| | residues: Asn-64 to Ala-78, Ser-155 to Ala-169, Lys-290 to Asp-314. |
| 841329 | Preferred epitopes include those comprising a sequence shown in SEQ ID NO. 1675 as |
| | residues: Leu-10 to Trp-18, Arg-21 to Leu-32, Pro-35 to Leu-55, Arg-74 to Phe-90, Pro-106 |
| | to Trp-115, Val-142 to Thr-152. |
| 841330 | Preferred epitopes include those comprising a sequence shown in SEQ ID NO. 1676 as |
| | residues: Gly-14 to Ala-19, Arg-34 to Arg-41. |
| 841333 | Preferred epitopes include those comprising a sequence shown in SEQ ID NO. 1677 as |
| | residues: Leu-20 to Val-26. |
| 841335 | Preferred epitopes include those comprising a sequence shown in SEQ ID NO. 1679 as |
| | residues: Asn-10 to Cys-17. |
| 841336 | Preferred epitopes include those comprising a sequence shown in SEQ ID NO. 1680 as |
| | residues: Lys-1 to Arg-9, Ala-57 to Met-66, Ile-70 to Glu-78, Ile-104 to Gly-125, Thr-155 |
| | to Glu-160, Pro-174 to Leu-184, Ala-200 to Arg-206, Ser-231 to Ser-255, Gln-281 to Asp- |
| | 287. |
| 841337 | Preferred epitopes include those comprising a sequence shown in SEQ ID NO. 1681 as |
| | residues: Arg-79 to Val-86, Ala-111 to Glu-125, Pro-148 to Met-153, Arg-180 to Leu-188, |
| | Pro-275 to Gly-296, Pro-336 to Phe-350, Gly-353 to Ser-362, Val-364 to Arg-371. |
| 841340 | Preferred epitopes include those comprising a sequence shown in SEQ ID NO. 1683 as |
| | residues: Pro-39 to Ser-46. |
| 841341 | Preferred epitopes include those comprising a sequence shown in SEQ ID NO. 1684 as |
| | residues: Pro-9 to Gly-23, Glu-43 to Ala-51, Ser-62 to Gly-91. |
| 841343 | Preferred epitopes include those comprising a sequence shown in SEQ ID NO. 1686 as |
| | residues: Lys-49 to Gly-66, Ala-78 to Ser-85, Gly-90 to Thr-97, Arg-124 to Gly-129. |
| 841352 | Preferred epitopes include those comprising a sequence shown in SEQ ID NO. 1688 as |
| | residues: Arg-37 to Leu-47, Gln-93 to Asp-112, Arg-114 to Arg-119, Arg-124 to Arg-142. |
| 841353 | Preferred epitopes include those comprising a sequence shown in SEQ ID NO. 1689 as |
| | residues: Leu-23 to Thr-28, Ile-47 to Lys-56, Arg-91 to Gln-99, Gly-111 to Ser-119. |
| 841354 | Preferred epitopes include those comprising a sequence shown in SEQ ID NO. 1690 as |
| | residues: Ser-36 to Arg-42. |
| 841360 | Preferred epitopes include those comprising a sequence shown in SEQ ID NO. 1691 as |
| | residues: Asn-1 to Thr-11, Pro-64 to Phe-75, Phe-117 to Ile-122, Glu-124 to Arg-131, Trp- |
| | 142 to Gln-147, Thr-176 to Ser-185, Arg-208 to Gly-215, Gln-238 to Ser-244, Ala-246 to |
| | Val-256, Ser-264 to Lys-272. |
| 841405 | Preferred epitopes include those comprising a sequence shown in SEQ ID NO. 1693 as |
| | residues: Leu-1 to Gly-14, Arg-21 to Gln-26, Lys-62 to Val-73, His-131 to Asp-136, Glu- |
| | 142 to Tyr-158, Val-162 to Gly-169, Gln-183 to Gly-189, Glu-205 to Gly-210, Gln-222 to |
| | Asp-231, Gly-237 to Tyr-244, Ala-251 to Leu-267, Asp-298 to Asn-305, Glu-332 to Lys- |
| | 337, Arg-344 to Ala-349. |
| 841526 | Preferred epitopes include those comprising a sequence shown in SEQ ID NO. 1694 as |
| | residues: Pro-1 to Arg-8. |
| 841712 | Preferred epitopes include those comprising a sequence shown in SEQ ID NO. 1695 as |
| | residues: Gln-34 to Lys-44, Ser-70 to Leu-75, Ala-79 to Pro-89, Glu-94 to Thr-101, Gln- |
| | 103 to Ser-112. |
| 842042 | Preferred epitopes include those comprising a sequence shown in SEQ ID NO. 1697 as |
| | residues: Arg-64 to Glu-69, Ile-78 to Tyr-86, Asp-128 to Gly-148, Pro-166 to Pro-187, Ala- |
| | 194 to Lys-239, Ala-243 to Ala-255. |
| 842453 | Preferred epitopes include those comprising a sequence shown in SEQ ID NO. 1698 as |
| | residues: Gly-41 to Gly-53, Gly-65 to Arg-74. |
| 842635 | Preferred epitopes include those comprising a sequence shown in SEQ ID NO. 1699 as |
| | residues: Cys-2 to Asp-11, Lys-39 to Phe-55, Tyr-72 to Trp-78, Thr-154 to Lys-164, Ser- |
| | 191 to Lys-203, Asp-218 to Asp-223. |
| 842927 | Preferred epitopes include those comprising a sequence shown in SEQ ID NO. 1700 as |
| | residues: Pro-8 to Trp-14, Gly-33 to Glu-48, Arg-58 to Lys-67, Thr-76 to Gln-96, Ala-98 to |
| | Ser-118, Cys-193 to Thr-201, Leu-225 to Trp-232, Asp-256 to Phe-262. |
| 843237 | Preferred epitopes include those comprising a sequence shown in SEQ ID NO. 1703 as |
| | residues: His-1 to Gly-14, Leu-36 to Ser-41, Gln-45 to Arg-59, Gly-66 to Arg-91, Lys-104 |
| | to Trp-113, Arg-143 to Leu-148, Val-172 to Val-181, Pro-235 to Lys-242. |
| 843381 | Preferred epitopes include those comprising a sequence shown in SEQ ID NO. 1704 as |
| | residues: Arg-9 to Arg-14, Gly-27 to Cys-32, Ser-53 to Leu-61, Ala-66 to Phe-71. |
| 843823 | Preferred epitopes include those comprising a sequence shown in SEQ ID NO. 1706 as |
| | residues: Asp-11 to Tyr-16. |
| 844056 | Preferred epitopes include those comprising a sequence shown in SEQ ID NO. 1707 as |
| | residues: Lys-145 to Thr-159, Ser-167 to Lys-176, Asn-216 to Lys-224. |
| 844344 | Preferred epitopes include those comprising a sequence shown in SEQ ID NO. 1709 as |
| | residues: Gly-4 to Asp-9, Glu-23 to Lys-31, Asn-38 to Tyr-47. |
| 844368 | Preferred epitopes include those comprising a sequence shown in SEQ ID NO. 1710 as |
| | residues: His-5 to Gly-15, Pro-97 to Cys-103. |
| 844408 | Preferred epitopes include those comprising a sequence shown in SEQ ID NO. 1711 as |
| | residues: Thr-49 to Gln-60. |
| 844867 | Preferred epitopes include those comprising a sequence shown in SEQ ID NO. 1713 as |
| | residues: Ile-49 to Thr-60. |
| 845281 | Preferred epitopes include those comprising a sequence shown in SEQ ID NO. 1715 as |
| | residues: Gly-5 to Arg-12. |
| 845288 | Preferred epitopes include those comprising a sequence shown in SEQ ID NO. 1716 as |
| | residues: Ala-1 to Gly-6, Ala-8 to Val-15, Ala-159 to Pro-164. |
| 845750 | Preferred epitopes include those comprising a sequence shown in SEQ ID NO. 1717 as |
| | residues: Arg-1 to Thr-9. |
| 845809 | Preferred epitopes include those comprising a sequence shown in SEQ ID NO. 1718 as |
| | residues: Glu-9 to Arg-14, Thr-19 to Arg-27, Asp-48 to Ile-57, Gln-63 to Leu-75, Cys-89 to |
| | Thr-104, Gly-106 to Pro-113, Gly-127 to Thr-133, Arg-144 to Asn-157, Ile-179 to Arg-199. |
| 846077 | Preferred epitopes include those comprising a sequence shown in SEQ ID NO. 1719 as |
| | residues: Pro-11 to Trp-18, Cys-59 to Pro-68, Thr-77 to Glu-86, Arg-94 to Asn-102. |
| HPRTI05R | Preferred epitopes include those comprising a sequence shown in SEQ ID NO. 1721 as |
| | residues: Pro-22 to Tyr-34. |
| HPDED94R | Preferred epitopes include those comprising a sequence shown in SEQ ID NO. 1724 as |
| | residues: Gly-1 to Glu-6. |
| HDTGH11R | Preferred epitopes include those comprising a sequence shown in SEQ ID NO. 1725 as |
| | residues: Thr-32 to Met-37. |
| HTEJR60R | Preferred epitopes include those comprising a sequence shown in SEQ ID NO. 1726 as |
| | residues: Ala-1 to Ser-6. |
| HAGGY86R | Preferred epitopes include those comprising a sequence shown in SEQ ID NO. 1727 as |
| | residues: Leu-25 to Trp-40, Val-49 to His-56, Leu-60 to Asn-67. |
| HPIAU47R | Preferred epitopes include those comprising a sequence shown in SEQ ID NO. 1728 as |
| | residues: Glu-88 to Leu-93. |
| HCGAD89R | Preferred epitopes include those comprising a sequence shown in SEQ ID NO. 1729 as |
| | residues: Glu-30 to Asp-45. |
| HAPOD39R | Preferred epitopes include those comprising a sequence shown in SEQ ID NO. 1730 as |
| | residues: Tyr-21 to Ala-28, Ser-74 to Gly-81. |
| HDRAA14R | Preferred epitopes include those comprising a sequence shown in SEQ ID NO. 1733 as |
| | residues: Ala-1 to Pro-8, Ala-10 to Val-16, Pro-43 to Leu-52. |
| HSLCA48R | Preferred epitopes include those comprising a sequence shown in SEQ ID NO. 1734 as |
| | residues: Gln-26 to Leu-31. |
| HMQDF20R | Preferred epitopes include those comprising a sequence shown in SEQ ID NO. 1736 as |
| | residues: Phe-33 to Ala-43, His-86 to Ser-93. |
| HCHOH06R | Preferred epitopes include those comprising a sequence shown in SEQ ID NO. 1737 as |
| | residues: Gly-4 to Lys-10, Arg-17 to Glu-24, Gln-36 to Glu-41, Arg-61 to Arg-76. |
| HLDRN91R | Preferred epitopes include those comprising a sequence shown in SEQ ID NO. 1740 as |
| | residues: Arg-22 to Gln-27, Ser-33 to Val-38, Lys-46 to Gly-57, Gln-92 to Gly-97. |
| HE6GO78R | Preferred epitopes include those comprising a sequence shown in SEQ ID NO. 1743 as |
| | residues: Ser-3 to Trp-12. |
| HSYBY17R | Preferred epitopes include those comprising a sequence shown in SEQ ID NO. 1745 as |
| | residues: Gln-30 to Pro-36. |
| HPJCS07R | Preferred epitopes include those comprising a sequence shown in SEQ ID NO. 1746 as |
| | residues: Tyr-25 to Phe-32. |
| HFKFH08R | Preferred epitopes include those comprising a sequence shown in SEQ ID NO. 1748 as |
| | residues: Arg-2 to Gln-8, Val-49 to Asn-54, Gln-58 to Tyr-64. |
| HPIBI27R | Preferred epitopes include those comprising a sequence shown in SEQ ID NO. 1750 as |
| | residues: Glu-17 to Asp-22, Pro-46 to Arg-52, Pro-75 to Asp-84. |
| HSKJG37R | Preferred epitopes include those comprising a sequence shown in SEQ ID NO. 1751 as |
| | residues: Leu-66 to Gly-72, Asp-89 to Pro-97, Thr-104 to Leu-110. |
| H2LAZ24R | Preferred epitopes include those comprising a sequence shown in SEQ ID NO. 1752 as |
| | residues: Pro-20 to Ala-26, Ser-107 to Ala-113, Asp-129 to Gly-135, Thr-139 to Asp-146, |
| | Ser-152 to Arg-168, Glu-173 to Pro-180. |
| H2LAS11R | Preferred epitopes include those comprising a sequence shown in SEQ ID NO. 1756 as |
| | residues: Pro-20 to Ser-25, Lys-67 to Phe-76, Pro-78 to Asn-86, Asp-100 to Gly-108, Arg- |
| | 116 to Gly-122, Glu-153 to Ala-158. |
| HADMC73R | Preferred epitopes include those comprising a sequence shown in SEQ ID NO. 1758 as |
| | residues: Ala-1 to Tyr-9. |
| HDTDX66R | Preferred epitopes include those comprising a sequence shown in SEQ ID NO. 1760 as |
| | residues: Met-2 to Leu-9, Lys-11 to Pro-28, Asp-57 to Leu-68, Gln-81 to Ser-96, Ser-98 to |
| | Arg-106. |
| HLPBB39R | Preferred epitopes include those comprising a sequence shown in SEQ ID NO. 1761 as |
| | residues: Cys-27 to Lys-33, Thr-35 to Cys-41. |
| HKABU38R | Preferred epitopes include those comprising a sequence shown in SEQ ID NO. 1763 as |
| | residues: Pro-1 to Pro-11, Ala-17 to Lys-25, Asp-54 to Leu-59, Thr-66 to Arg-76, Arg-90 to |
| | Pro-107, Pro-139 to Glu-146. |
| HATAI03R | Preferred epitopes include those comprising a sequence shown in SEQ ID NO. 1765 as |
| | residues: Phe-1 to Asn-6. |
| HCEDE25R | Preferred epitopes include those comprising a sequence shown in SEQ ID NO. 1766 as |
| | residues: Ala-6 to Thr-13. |
| H2LAO77R | Preferred epitopes include those comprising a sequence shown in SEQ ID NO. 1770 as |
| | residues: Ala-16 to Pro-30, Thr-44 to Val-57, Lys-75 to Gly-50, Asp-92 to Leu-102, Ala- |
| | 113 to Tyr-120. |
| HNTRW15R | Preferred epitopes include those comprising a sequence shown in SEQ ID NO. 1771 as |
| | residues: Met-3 to Lys-9, Ala-16 to Trp-37. |
| HULBL38R | Preferred epitopes include those comprising a sequence shown in SEQ ID NO. 1773 as |
| | residues: Cys-1 to Glu-6, Asp-52 to Asp-65, Lys-82 to Pro-88. |
| HNTBK49R | Preferred epitopes include those comprising a sequence shown in SEQ ID NO. 1774 as |
| | residues: Pro-40 to Gly-45. |
| HBAFS48R | Preferred epitopes include those comprising a sequence shown in SEQ ID NO. 1775 as |
| | residues: Pro-1 to Glu-18, Pro-37 to Met-44. |
| HOHBU75R | Preferred epitopes include those comprising a sequence shown in SEQ ID NO. 1777 as |
| | residues: His-24 to Gly-29, Glu-32 to Asp-37, Gly-47 to Pro-60. |
| HSLBA61R | Preferred epitopes include those comprising a sequence shown in SEQ ID NO. 1779 as |
| | residues: Asn-37 to Thr-42. |
| HKAKR61R | Preferred epitopes include those comprising a sequence shown in SEQ ID NO. 1782 as |
| | residues: Arg-1 to Thr-7. |
| H2LAD40R | Preferred epitopes include those comprising a sequence shown in SEQ ID NO. 1785 as |
| | residues: Trp-13 to Asp-19, Cys-29 to Gln-34, Ala-41 to Arg-52, Gly-54 to Gln-59, Arg-69 |
| | to Pro-78. |
| H2MBU27R | Preferred epitopes include those comprising a sequence shown in SEQ ID NO. 1788 as |
| | residues: Asp-3 to Lys-9, Arg-88 to Gln-95. |
| HDSAH53R | Preferred epitopes include those comprising a sequence shown in SEQ ID NO. 1789 as |
| | residues: Asp-7 to Lys-13. |
| HAIDF69R | Preferred epitopes include those comprising a sequence shown in SEQ ID NO. 1790 as |
| | residues: Gln-13 to Pro-22. |
| HTWJC11R | Preferred epitopes include those comprising a sequence shown in SEQ ID NO. 1793 as |
| | residues: Pro-27 to Val-32. |
| HKAEC40R | Preferred epitopes include those comprising a sequence shown in SEQ ID NO. 1794 as |
| | residues: Lys-86 to Lys-91. |
| HCFNM70R | Preferred epitopes include those comprising a sequence shown in SEQ ID NO. 1795 as |
| | residues: Thr-19 to Lys-24. |
| HKBAB93R | Preferred epitopes include those comprising a sequence shown in SEQ ID NO. 1796 as |
| | residues: Lys-9 to Tyr-26, Arg-48 to Lys-53, Ser-68 to Thr-75, Ala-84 to Leu-89. |
| HMAEA94R | Preferred epitopes include those comprising a sequence shown in SEQ ID NO. 1800 as |
| | residues: His-60 to Asp-69, Phe-87 to Ala-93. |
| HMWEA08R | Preferred epitopes include those comprising a sequence shown in SEQ ID NO. 1801 as |
| | residues: Met-3 to Thr-8, Tyr-33 to Gly-38, Lys-54 to Glu-65. |
| HRACC09R | Preferred epitopes include those comprising a sequence shown in SEQ ID NO. 1803 as |
| | residues: Lys-7 to Trp-18. |
| HOEEC67R | Preferred epitopes include those comprising a sequence shown in SEQ ID NO. 1804 as |
| | residues: Lys-24 to Glu-31. |
| HPFEA40R | Preferred epitopes include those comprising a sequence shown in SEQ ID NO. 1805 as |
| | residues: Arg-4 to Ile-20. |
| HHECI89R | Preferred epitopes include those comprising a sequence shown in SEQ ID NO. 1807 as |
| | residues: Ala-1 to Arg-12, Pro-22 to Met-28, Glu-53 to Thr-61, Gly-90 to Ile-97. |
| HSDFV03R | Preferred epitopes include those comprising a sequence shown in SEQ ID NO. 1808 as |
| | residues: Ser-18 to Phe-24, Pro-40 to Thr-46. |
| HTXPN01R | Preferred epitopes include those comprising a sequence shown in SEQ ID NO. 1809 as |
| | residues: Lys-19 to Glu-28. |
| HACBH95R | Preferred epitopes include those comprising a sequence shown in SEQ ID NO. 1813 as |
| | residues: Pro-43 to Gly-51. |
| HACBY16R | Preferred epitopes include those comprising a sequence shown in SEQ ID NO. 1814 as |
| | residues: Arg-1 to Glu-16. |
| HAHAD34R | Preferred epitopes include those comprising a sequence shown in SEQ ID NO. 1816 as |
| | residues: Gly-13 to Ala-21. |
| HAJAN69R | Preferred epitopes include those comprising a sequence shown in SEQ ID NO. 1817 as |
| | residues: Gly-1 to Gly-22, Pro-61 to Ala-70. |
| HAPPR17R | Preferred epitopes include those comprising a sequence shown in SEQ ID NO. 1819 as |
| | residues: Asn-8 to Met-13, Asp-15 to Met-21. |
| HBGBE20R | Preferred epitopes include those comprising a sequence shown in SEQ ID NO. 1824 as |
| | residues: Arg-28 to Leu-33. |
| HBMVT43R | Preferred epitopes include those comprising a sequence shown in SEQ ID NO. 1828 as |
| | residues: Pro-1 to Asn-8. |
| HCFLN25R | Preferred epitopes include those comprising a sequence shown in SEQ ID NO. 1830 as |
| | residues: Gly-16 to Trp-21, Pro-24 to Leu-32. |
| HCQAW59R | Preferred epitopes include those comprising a sequence shown in SEQ ID NO. 1831 as |
| | residues: Gly-1 to Gly-8, Pro-11 to Asn-21. |
| HDPMA46R | Preferred epitopes include those comprising a sequence shown in SEQ ID NO. 1832 as |
| | residues: Glu-14 to Gly-32, Pro-61 to Gly-66. |
| HDTAQ26R | Preferred epitopes include those comprising a sequence shown in SEQ ID NO. 1833 as |
| | residues: Ser-1 to Gly-7. |
| HDTLD39R | Preferred epitopes include those comprising a sequence shown in SEQ ID NO. 1835 as |
| | residues: Thr-14 to Ser-44. |
| HE2PO63R | Preferred epitopes include those comprising a sequence shown in SEQ ID NO. 1836 as |
| | residues: Phe-11 to Lys-17, Gly-36 to Gly-43. |
| HELHK95R | Preferred epitopes include those comprising a sequence shown in SEQ ID NO. 1838 as |
| | residues: Pro-20 to Pro-28. |
| HETIB72R | Preferred epitopes include those comprising a sequence shown in SEQ ID NO. 1840 as |
| | residues: Gln-1 to Glu-9. |
| HFIYH65R | Preferred epitopes include those comprising a sequence shown in SEQ ID NO. 1842 as |
| | residues: Ala-2 to His-8, Gly-26 to Cys-32. |
| HKIXO47R | Preferred epitopes include those comprising a sequence shown in SEQ ID NO. 1848 as |
| | residues: Ala-1 to Arg-8, Val-12 to Lys-25. |
| HLWBC80R | Preferred epitopes include those comprising a sequence shown in SEQ ID NO. 1851 as |
| | residues: Arg-72 to Gly-80, Leu-86 to Phe-92. |
| HLYAV50R | Preferred epitopes include those comprising a sequence shown in SEQ ID NO. 1852 as |
| | residues: Asp-1 to Gly-6, Gly-44 to Arg-50. |
| HMEKY67R | Preferred epitopes include those comprising a sequence shown in SEQ ID NO. 1853 as |
| | residues: Arg-12 to Phe-24, Pro-32 to Ser-43. |
| HOUDQ92R | Preferred epitopes include those comprising a sequence shown in SEQ ID NO. 1858 as |
| | residues: Arg-1 to Cys-7. |
| HPIAF72R | Preferred epitopes include those comprising a sequence shown in SEQ ID NO. 1860 as |
| | residues: Gln-1 to Arg-17, Ala-25 to Pro-32. |
| HPIAU01R | Preferred epitopes include those comprising a sequence shown in SEQ ID NO. 1861 as |
| | residues: Pro-9 to Gly-18. |
| HPIAU73R | Preferred epitopes include those comprising a sequence shown in SEQ ID NO. 1862 as |
| | residues: Arg-9 to Gln-35, Arg-51 to Gly-56. |
| HPIAW19R | Preferred epitopes include those comprising a sequence shown in SEQ ID NO. 1863 as |
| | residues: Ala-16 to Arg-26, Thr-67 to Asn-76. |
| HPIAZ19R | Preferred epitopes include those comprising a sequence shown in SEQ ID NO. 1864 as |
| | residues: Glu-1 to His-6, Gly-19 to Trp-31. |
| HPIBA31R | Preferred epitopes include those comprising a sequence shown in SEQ ID NO. 1865 as |
| | residues: Glu-1 to His-6, Gly-19 to Trp-31. |
| HPIBS06R | Preferred epitopes include those comprising a sequence shown in SEQ ID NO. 1866 as |
| | residues: Pro-25 to Lys-31. |
| HPICB65R | Preferred epitopes include those comprising a sequence shown in SEQ ID NO. 1867 as |
| | residues: Ser-2 to Gln-10, Val-26 to Lys-34, Asp-52 to Glu-58, Arg-93 to Trp-102. |
| HPJBF22R | Preferred epitopes include those comprising a sequence shown in SEQ ID NO. 1868 as |
| | residues: Glu-1 to His-6, Gly-19 to Trp-31. |
| HPJBZ81R | Preferred epitopes include those comprising a sequence shown in SEQ ID NO. 1869 as |
| | residues: Ser-18 to Gly-23. |
| HSDJK57R | Preferred epitopes include those comprising a sequence shown in SEQ ID NO. 1873 as |
| | residues: Thr-53 to Arg-64. |
| HSIFY54R | Preferred epitopes include those comprising a sequence shown in SEQ ID NO. 1874 as |
| | residues: Phe-35 to Asp-58, Phe-92 to Phe-105. |
| HUFAT72R | Preferred epitopes include those comprising a sequence shown in SEQ ID NO. 1878 as |
| | residues: Pro-16 to Phe-25. |
| HULAI70R | Preferred epitopes include those comprising a sequence shown in SEQ ID NO. 1879 as |
| | residues: Pro-13 to Gly-22, Arg-45 to Cys-50. |
| HTGFW12R | Preferred epitopes include those comprising a sequence shown in SEQ ID NO. 1880 as |
| | residues: Pro-6 to Gly-16, Arg-24 to Pro-32. |

[0104] The present invention encompasses polypeptides comprising, or alternatively consisting of, an epitope of the polypeptide sequence shown in SEQ ID NO:Y, or an epitope of the polypeptide sequence encoded by the cDNA in the related cDNA clone contained in a deposited library or encoded by a polynucleotide that hybridizes to the complement of an epitope encoding sequence of SEQ ID NO:X, or an epitope encoding sequence contained in the deposited cDNA clone under stringent hybridization conditions, or alternatively, under lower stringency hybridization conditions, as defined supra. The present invention further encompasses polynucleotide sequences encoding an epitope of a polypeptide sequence of the invention (such as, for example, the sequence disclosed in SEQ ID NO:X), polynucleotide sequences of the complementary strand of a polynucleotide sequence encoding an epitope of the invention, and polynucleotide sequences which hybridize to this complementary strand under stringent hybridization conditions or alternatively, under lower stringency hybridization conditions, as defined supra.

[0105] The term “epitopes,” as used herein, refers to portions of a polypeptide having antigenic or immunogenic activity in an animal, preferably a mammal, and most preferably in a human. In a preferred embodiment, the present invention encompasses a polypeptide comprising an epitope, as well as the polynucleotide encoding this polypeptide. An “immunogenic epitope,” as used herein, is defined as a portion of a protein that elicits an antibody response in an animal, as determined by any method known in the art, for example, by methods for generating antibodies described infra. (See, for example, Geysen et al., Proc. Natl. Acad. Sci. USA 81:3998-4002 (1983)). The term “antigenic epitope,” as used herein, is defined as a portion of a protein to which an antibody can immunospecifically bind its antigen as used herein, is defined as a portion of a protein to which an known in the art, for example, by the immunoassays described herein. Immunospecific binding excludes non-specific binding but does not necessarily exclude cross-reactivity with other antigens. Antigenic epitopes need not necessarily be immunogenic.

[0106] Fragments which function as epitopes may be produced by any conventional means. (See, e.g., Houghten, R. A., Proc. Natl. Acad. Sci. USA 82:5131-5135 (1985) further described in U.S. Pat. No. 4,631,211.)

[0107] In the present invention, antigenic epitopes preferably contain a sequence of at least 4, at least 5, at least 6, at least 7, more preferably at least 8, at least 9, at least 10, at least 11, at least 12, at least 13, at least 14, at least 15, at least 20, at least 25, least 30, at least 40, at least 50, and, most preferably, between about 15 to about 30 amino acids. Preferred polypeptides comprising immunogenic or antigenic epitopes are at least 10, 15, 20, 25, 30, 35, 40, 45, 50, 55, 60, 65, 70, 75, 80, 85, 90, 95, or 100 amino acid residues in length. Additional non-exclusive preferred antigenic epitopes include the antigenic epitopes disclosed herein, as well as portions thereof. Antigenic epitopes are useful, for example, to raise antibodies, including monoclonal antibodies, that specifically bind the epitope. Preferred antigenic epitopes include the antigenic epitopes disclosed herein, as well as any combination of two, three, four, five or more of these antigenic epitopes. Antigenic epitopes can be used as the target molecules in immunoassays. (See, for instance, Wilson et al., Cell 37:767-778 (1984); Sutcliffe et al., Science 219:660-666 (1983)).

[0108] Similarly, immunogenic epitopes can be used, for example, to induce antibodies according to methods well known in the art. (See, for instance, Sutcliffe et al., supra; Wilson et al., supra; Chow et al., Proc. Natl. Acad. Sci. USA 82:910-914; and Bittle et al., J. Gen. Virol. 66:2347-2354 (1985). Preferred immunogenic epitopes include the immunogenic epitopes disclosed herein, as well as any combination of two, three, four, five or more of these immunogenic epitopes. The polypeptides comprising one or more immunogenic epitopes may be presented for eliciting an antibody response together with a carrier protein, such as an albumin, to an animal system (such as rabbit or mouse), or, if the polypeptide is of sufficient length (at least about 25 amino acids), the polypeptide may be presented without a carrier. However, immunogenic epitopes comprising as few as 8 to 10 amino acids have been shown to be sufficient to raise antibodies capable of binding to, at the very least, linear epitopes in a denatured polypeptide (e.g., in Western blotting).

[0109] Epitope-bearing polypeptides of the present invention may be used to induce antibodies according to methods well known in the art including, but not limited to, in vivo immunization, in vitro immunization, and phage display methods. See, e.g., Sutcliffe et al., supra; Wilson et al., supra, and Bittle et al., J. Gen. Virol., 66:2347-2354 (1985). If in vivo immunization is used, animals may be immunized with free peptide; however, anti-peptide antibody titer may be boosted by coupling the peptide to a macromolecular carrier, such as keyhole limpet hemacyanin (KLH) or tetanus toxoid. For instance, peptides containing cysteine residues may be coupled to a carrier using a linker such as maleimidobenzoyl-N-hydroxysuccinimide ester (MBS), while other peptides may be coupled to carriers using a more general linking agent such as glutaraldehyde. Animals such as rabbits, rats and mice are immunized with either free or carrier-coupled peptides, for instance, by intraperitoneal and/or intradermal injection of emulsions containing about 100 μg of peptide or carrier protein and Freund's adjuvant or any other adjuvant known for stimulating an immune response. Several booster injections may be needed, for instance, at intervals of about two weeks, to provide a useful titer of anti-peptide antibody which can be detected, for example, by ELISA assay using free peptide adsorbed to a solid surface. The titer of anti-peptide antibodies in serum from an immunized animal may be increased by selection of anti-peptide antibodies, for instance, by adsorption to the peptide on a solid support and elution of the selected antibodies according to methods well known in the art.

[0110] As one of skill in the art will appreciate, and as discussed above, the polypeptides of the present invention, and immunogenic and/or antigenic epitope fragments thereof can be fused to other polypeptide sequences. For example, the polypeptides of the present invention may be fused with the constant domain of immunoglobulins (IgA, IgE, IgG, IgM), or portions thereof (CII1, CII2, CII3, or any combination thereof and portions thereof) resulting in chimeric polypeptides. Such fusion proteins may facilitate purification and may increase half-life in vivo. This has been shown for chimeric proteins consisting of the first two domains of the human CD4-polypeptide and various domains of the constant regions of the heavy or light chains of mammalian immunoglobulins. See, e.g., EP 394,827; Traunecker et al., Nature, 331:84-86 (1988). Enhanced delivery of an antigen across the epithelial barrier to the immune system has been demonstrated for antigens (e.g., insulin) conjugated to an FcRn binding partner such as IgG or Fc fragments (see, e.g., PCT Publications WO 96/22024 and WO 99/04813). IgG Fusion proteins that have a disulfide-linked dimeric structure due to the IgG portion desulfide bonds have also been found to be more efficient in binding and neutralizing other molecules than monomeric polypeptides or fragments thereof alone. See, e.g., Fountoulakis et al., J. Biochem., 270:3958-3964 (1995).

[0111] Similarly, EP-A-O 464 533 (Canadian counterpart 2045869) discloses fusion proteins comprising various portions of constant region of immunoglobulin molecules together with another human protein or part thereof. In many cases, the Fc part in a fusion protein is beneficial in therapy and diagnosis, and thus can result in, for example, improved pharmacokinetic properties. (EP-A 0232 262.) Alternatively, deleting the Fc part after the fusion protein has been expressed, detected, and purified, may be desired. For example, the Fc portion may hinder therapy and diagnosis if the fusion protein is used as an antigen for immunizations. In drug discovery, for example, human proteins, such as hIL-5, have been fused with Fc portions for the purpose of high-throughput screening assays to identify antagonists of hIL-5. (See, D. Bennett et al., J. Molecular Recognition 8:52-58 (1995); K. Johanson et al., J. Biol. Chem. 270:9459-9471 (1995).)

[0112] Moreover, the polypeptides of the present invention can be fused to marker sequences, such as a peptide which facilitates purification of the fused polypeptide. In preferred embodiments, the marker amino acid sequence is a hexa-histidine peptide, such as the tag provided in a pQE vector (QIAGEN, Inc., 9259 Eton Avenue, Chatsworth, Calif., 91311), among others, many of which are commercially available. As described in Gentz et al., Proc. Natl. Acad. Sci. USA 86:821-824 (1989), for instance, hexa-histidine provides for convenient purification of the fusion protein. Another peptide tag useful for purification, the “HA” tag, corresponds to an epitope derived from the influenza hemagglutinin protein. (Wilson et al., Cell 37:767 (1984).)

[0113] Thus, any of these above fusions can be engineered using the polynucleotides or the polypeptides of the present invention.

[0114] Nucleic acids encoding the above epitopes can also be recombined with a gene of interest as an epitope tag (e.g., the hemagglutinin (“HA”) tag or flag tag) to aid in detection and purification of the expressed polypeptide. For example, a system described by Janknecht et al. allows for the ready purification of non-denatured fusion proteins expressed in human cell lines (Janknecht et al., Proc. Natl. Acad. Sci. USA 88:8972-897 (1991)). In this system, the gene of interest is subcloned into a vaccinia recombination plasmid such that the open reading frame of the gene is translationally fused to an amino-terminal tag consisting of six histidine residues. The tag serves as a matrix binding domain for the fusion protein. Extracts from cells infected with the recombinant vaccinia virus are loaded onto Ni2+ nitriloacetic acid-agarose column and histidine-tagged proteins can be selectively eluted with imidazole-containing buffers.

[0115] Additional fusion proteins of the invention may be generated through the techniques of gene-shuffling, motif-shuffling, exon-shuffling, and/or codon-shuffling (collectively referred to as “DNA shuffling”). DNA shuffling may be employed to modulate the activities of polypeptides of the invention, such methods can be used to generate polypeptides with altered activity, as well as agonists and antagonists of the polypeptides. See, generally, U.S. Pat. Nos. 5,605,793; 5,811,238; 5,830,721; 5,834,252; and 5,837,458, and Patten et al., Curr. Opinion Biotechnol. 8:724-33 (1997); Harayama, Trends Biotechnol. 16(2):76-82 (1998); Hansson, et al., J. Mol. Biol. 287:265-76 (1999); and Lorenzo and Blasco, Biotechniques 24(2):308-13 (1998) (each of these patents and publications are hereby incorporated by reference in its entirety). In one embodiment, alteration of polynucleotides corresponding to SEQ ID NO:X and the polypeptides encoded by these polynucleotides may be achieved by DNA shuffling. DNA shuffling involves the assembly of two or more DNA segments by homologous or site-specific recombination to generate variation in the polynucleotide sequence. In another embodiment, polynucleotides of the invention, or the encoded polypeptides, may be altered by being subjected to random mutagenesis by error-prone PCR, random nucleotide insertion or other methods prior to recombination. In another embodiment, one or more components, motifs, sections, parts, domains, fragments, etc., of a polynucleotide encoding a polypeptide of the invention may be recombined with one or more components, motifs, sections, parts, domains, fragments, etc. of one or more heterologous molecules.

[0116] As discussed herein, any polypeptide of the present invention can be used to generate fusion proteins. For example, the polypeptide of the present invention, when fused to a second protein, can be used as an antigenic tag. Antibodies raised against the polypeptide of the present invention can be used to indirectly detect the second protein by binding to the polypeptide. Moreover, because secreted proteins target cellular locations based on trafficking signals, polypeptides of the present invention which are shown to be secreted can be used as targeting molecules once fused to other proteins.

[0117] Examples of domains that can be fused to polypeptides of the present invention include not only heterologous signal sequences, but also other heterologous functional regions. The fusion does not necessarily need to be direct, but may occur through linker sequences.

[0118] In certain preferred embodiments, proteins of the invention comprise fusion proteins wherein the polypeptides are N and/or C-terminal deletion mutants. In preferred embodiments, the application is directed to nucleic acid molecules at least 80%, 85%, 90%, 95%, 96%, 97%, 98% or 99% identical to the nucleic acid sequences encoding polypeptides having the amino acid sequence of the specific N- and C-terminal deletions mutants. Polynucleotides encoding these polypeptides are also encompassed by the invention.

[0119] Moreover, fusion proteins may also be engineered to improve characteristics of the polypeptide of the present invention. For instance, a region of additional amino acids, particularly charged amino acids, may be added to the N-terminus of the polypeptide to improve stability and persistence during purification from the host cell or subsequent handling and storage. Also, peptide moieties may be added to the polypeptide to facilitate purification. Such regions may be removed prior to final preparation of the polypeptide. The addition of peptide moieties to facilitate handling of polypeptides are familiar and routine techniques in the art.

[0120] Vectors, Host Cells, and Protein Production

[0121] The present invention also relates to vectors containing the polynucleotide of the present invention, host cells, and the production of polypeptides by recombinant techniques. The vector may be, for example, a phage, plasmid, viral, or retroviral vector. Retroviral vectors may be replication competent or replication defective. In the latter case, viral propagation generally will occur only in complementing host cells.

[0122] The polynucleotides of the invention may be joined to a vector containing a selectable marker for propagation in a host. Generally, a plasmid vector is introduced in a precipitate, such as a calcium phosphate precipitate, or in a complex with a charged lipid. If the vector is a virus, it may be packaged in vitro using an appropriate packaging cell line and then transduced into host cells.

[0123] The polynucleotide insert should be operatively linked to an appropriate promoter, such as the phage lambda PL promoter, the E. coli lac, trp, phoA and tac promoters, the SV40 early and late promoters and promoters of retroviral LTRs, to name a few. Other suitable promoters will be known to the skilled artisan. The expression constructs will further contain sites for transcription initiation, termination, and, in the transcribed region, a ribosome binding site for translation. The coding portion of the transcripts expressed by the constructs will preferably include a translation initiating codon at the beginning and a termination codon (UAA, UGA or UAG) appropriately positioned at the end of the polypeptide to be translated.

[0124] As indicated, the expression vectors will preferably include at least one selectable marker. Such markers include dihydrofolate reductase, G418 or neomycin resistance for eukaryotic cell culture and tetracycline, kanamycin or ampicillin resistance genes for culturing in E. coli and other bacteria. Representative examples of appropriate hosts include, but are not limited to, bacterial cells, such as E. coli, Streptomyces and Salmonella typhimurium cells; fungal cells, such as yeast cells (e.g., Saccharomyces cerevisiae or Pichia pastoris (ATCC Accession No. 201178)); insect cells such as Drosophila S2 and Spodoptera Sf9 cells; animal cells such as CHO, COS, 293, and Bowes melanoma cells; and plant cells. Appropriate culture mediums and conditions for the above-described host cells are known in the art.

[0125] Among vectors preferred for use in bacteria include pQE70, pQE60 and pQE-9, available from QIAGEN, Inc.; pBluescript vectors, Phagescript vectors, pNH8A, pNH16a, pNH18A, pNH46A, available from Stratagene Cloning Systems, Inc.; and ptrc99a, pKK223-3, pKK233-3, pDR540, pRIT5 available from Pharmacia Biotech, Inc. Among preferred eukaryotic vectors are pWLNEO, pSV2CAT, pOG44, pXT1 and pSG available from Stratagene; and pSVK3, pBPV, pMSG and pSVL available from Pharmacia. Preferred expression vectors for use in yeast systems include, but are not limited to pYES2, pYD1, pTEF1/Zeo, pYES2/GS, pPICZ, pGAPZ, pGAPZalph, pPIC9, pPIC3.5, pHIL-D2, pHIL-S1, pPIC3.5K, pPIC9K, and PAO815 (all available from Invitrogen, Carlbad, Calif.). Other suitable vectors will be readily apparent to the skilled artisan.

[0126] Introduction of the construct into the host cell can be effected by calcium phosphate transfection, DEAE-dextran mediated transfection, cationic lipid-mediated transfection, electroporation, transduction, infection, or other methods. Such methods are described in many standard laboratory manuals, such as Davis et al., Basic Methods In Molecular Biology (1986). It is specifically contemplated that the polypeptides of the present invention may in fact be expressed by a host cell lacking a recombinant vector.

[0127] A polypeptide of this invention can be recovered and purified from recombinant cell cultures by well-known methods including ammonium sulfate or ethanol precipitation, acid extraction, anion or cation exchange chromatography, phosphocellulose chromatography, hydrophobic interaction chromatography, affinity chromatography, hydroxylapatite chromatography and lectin chromatography. Most preferably, high performance liquid chromatography (“HPLC”) is employed for purification.

[0128] Polypeptides of the present invention can also be recovered from: products purified from natural sources, including bodily fluids, tissues and cells, whether directly isolated or cultured; products of chemical synthetic procedures; and products produced by recombinant techniques from a prokaryotic or eukaryotic host, including, for example, bacterial, yeast, higher plant, insect, and mammalian cells. Depending upon the host employed in a recombinant production procedure, the polypeptides of the present invention may be glycosylated or may be non-glycosylated. In addition, polypeptides of the invention may also include an initial modified methionine residue, in some cases as a result of host-mediated processes. Thus, it is well known in the art that the N-terminal methionine encoded by the translation initiation codon generally is removed with high efficiency from any protein after translation in all eukaryotic cells. While the N-terminal methionine on most proteins also is efficiently removed in most prokaryotes, for some proteins, this prokaryotic removal process is inefficient, depending on the nature of the amino acid to which the N-terminal methionine is covalently linked.

[0129] In one embodiment, the yeast Pichia pastoris is used to express polypeptides of the invention in a eukaryotic system. Pichia pastoris is a methylotrophic yeast which can metabolize methanol as its sole carbon source. A main step in the methanol metabolization pathway is the oxidation of methanol to formaldehyde using O₂. This reaction is catalyzed by the enzyme alcohol oxidase. In order to metabolize methanol as its sole carbon source, Pichia pastoris must generate high levels of alcohol oxidase due, in part, to the relatively low affinity of alcohol oxidase for O₂. Consequently, in a growth medium depending on methanol as a main carbon source, the promoter region of one of the two alcohol oxidase genes (AOX1) is highly active. In the presence of methanol, alcohol oxidase produced from the AOX1 gene comprises up to approximately 30% of the total soluble protein in Pichia pastoris. See, Ellis, S. B., et al., Mol. Cell. Biol. 5:1111-21 (1985); Koutz, P. J, et al., Yeast 5:167-77 (1989); Tschopp, J. F., et al., Nucl. Acids Res. 15:3859-76 (1987). Thus, a heterologous coding sequence, such as, for example, a polynucleotide of the present invention, under the transcriptional regulation of all or part of the AOX1 regulatory sequence is expressed at exceptionally high levels in Pichia yeast grown in the presence of methanol.

[0130] In one example, the plasmid vector pPIC9K is used to express DNA encoding a polypeptide of the invention, as set forth herein, in a Pichea yeast system essentially as described in “Pichia Protocols: Methods in Molecular Biology,” D. R. Higgins and J. Cregg, eds. The Humana Press, Totowa, N.J., 1998. This expression vector allows expression and secretion of a polypeptide of the invention by virtue of the strong AOX1 promoter linked to the Pichia pastoris alkaline phosphatase (PHO) secretory signal peptide (i.e., leader) located upstream of a multiple cloning site.

[0131] Many other yeast vectors could be used in place of pPIC9K, such as, pYES2, pYD1, pTEF1/Zeo, pYES2/GS, pPICZ, pGAPZ, pGAPZalpha, pPIC9, pPIC3.5, pHIL-D2, pHIL-S1, pPIC3.5K, and PAO815, as one skilled in the art would readily appreciate, as long as the proposed expression construct provides appropriately located signals for transcription, translation, secretion (if desired), and the like, including an in-frame AUG as required.

[0132] In another embodiment, high-level expression of a heterologous coding sequence, such as, for example, a polynucleotide of the present invention, may be achieved by cloning the heterologous polynucleotide of the invention into an expression vector such as, for example, pGAPZ or pGAPZalpha, and growing the yeast culture in the absence of methanol.

[0133] In addition to encompassing host cells containing the vector constructs discussed herein, the invention also encompasses primary, secondary, and immortalized host cells of vertebrate origin, particularly mammalian origin, that have been engineered to delete or replace endogenous genetic material (e.g., coding sequence), and/or to include genetic material (e.g., heterologous polynucleotide sequences) that is operably associated with polynucleotides of the invention, and which activates, alters, and/or amplifies endogenous polynucleotides. For example, techniques known in the art may be used to operably associate heterologous control regions (e.g., promoter and/or enhancer) and endogenous polynucleotide sequences via homologous recombination (see, e.g., U.S. Pat. No. 5,641,670, issued Jun. 24, 1997; International Publication No. WO 96/29411, published Sep. 26, 1996; International Publication No. WO 94/12650, published Aug. 4, 1994; Koller et al., Proc. Natl. Acad. Sci. USA 86:8932-8935 (1989); and Zijlstra et al., Nature 342:435-438 (1989), the disclosures of each of which are incorporated by reference in their entireties).

[0134] In addition, polypeptides of the invention can be chemically synthesized using techniques known in the art (e.g., see Creighton, 1983, Proteins: Structures and Molecular Principles, W. H. Freeman & Co., N.Y., and Hunkapiller et al., Nature, 310:105-111 (1984)). For example, a polypeptide corresponding to a fragment of a polypeptide can be synthesized by use of a peptide synthesizer. Furthermore, if desired, nonclassical amino acids or chemical amino acid analogs can be introduced as a substitution or addition into the polypeptide sequence. Non-classical amino acids include, but are not limited to, to the D-isomers of the common amino acids, 2,4-diaminobutyric acid, a-amino isobutyric acid, 4-aminobutyric acid, Abu, 2-amino butyric acid, g-Abu, e-Ahx, 6-amino hexanoic acid, Aib, 2-amino isobutyric acid, 3-amino propionic acid, ornithine, norleucine, norvaline, hydroxyproline, sarcosine, citrulline, homocitrulline, cysteic acid, t-butylglycine, t-butylalanine, phenylglycine, cyclohexylalanine, b-alanine, fluoro-amino acids, designer amino acids such as b-methyl amino acids, Ca-methyl amino acids, Na-methyl amino acids, and amino acid analogs in general. Furthermore, the amino acid can be D (dextrorotary) or L (levorotary).

[0135] Non-naturally occurring variants may be produced using art-known mutagenesis techniques, which include, but are not limited to oligonucleotide mediated mutagenesis, alanine scanning, PCR mutagenesis, site directed mutagenesis (see, e.g., Carter et al., Nucl. Acids Res. 13:4331 (1986); and Zoller et al., Nucl. Acids Res. 10:6487 (1982)), cassette mutagenesis (see, e.g., Wells et al., Gene 34:315 (1985)), restriction selection mutagenesis (see, e.g., Wells et al., Philos. Trans. R. Soc. London SerA 317:415 (1986)).

[0136] The invention additionally, encompasses polypeptides of the present invention which are differentially modified during or after translation, e.g., by glycosylation, acetylation, phosphorylation, amidation, derivatization by known protecting/blocking groups, proteolytic cleavage, linkage to an antibody molecule or other cellular ligand, etc. Any of numerous chemical modifications may be carried out by known techniques, including but not limited, to specific chemical cleavage by cyanogen bromide, trypsin, chymotrypsin, papain, V8 protease, NaBH₄; acetylation, formylation, oxidation, reduction; metabolic synthesis in the presence of tunicamycin; etc.

[0137] Additional post-translational modifications encompassed by the invention include, for example, e.g., N-linked or O-linked carbohydrate chains, processing of N-terminal or C-terminal ends), attachment of chemical moieties to the amino acid backbone, chemical modifications of N-linked or O-linked carbohydrate chains, and addition or deletion of an N-terminal methionine residue as a result of procaryotic host cell expression. The polypeptides may also be modified with a detectable label, such as an enzymatic, fluorescent, isotopic or affinity label to allow for detection and isolation of the protein.

[0138] Also provided by the invention are chemically modified derivatives of the polypeptides of the invention which may provide additional advantages such as increased solubility, stability and circulating time of the polypeptide, or decreased immunogenicity (see U.S. Pat. No. 4,179,337). The chemical moieties for derivitization may be selected from water soluble polymers such as polyethylene glycol, ethylene glycol/propylene glycol copolymers, carboxymethylcellulose, dextran, polyvinyl alcohol and the like. The polypeptides may be modified at random positions within the molecule, or at predetermined positions within the molecule and may include one, two, three or more attached chemical moieties.

[0139] The polymer may be of any molecular weight, and may be branched or unbranched. For polyethylene glycol, the preferred molecular weight is between about 1 kDa and about 100 kDa (the term “about” indicating that in preparations of polyethylene glycol, some molecules will weigh more, some less, than the stated molecular weight) for ease in handling and manufacturing. Other sizes may be used, depending on the desired therapeutic profile (e.g., the duration of sustained release desired, the effects, if any on biological activity, the ease in handling, the degree or lack of antigenicity and other known effects of the polyethylene glycol to a therapeutic protein or analog). For example, the polyethylene glycol may have an average molecular weight of about 200; 500; 1000; 1500; 2000; 2500; 3000; 3500; 4000; 4500; 5000; 5500; 6000; 6500; 7000; 7500; 8000; 8500; 9000; 9500; 10,000; 10,500; 11,000; 11,500; 12,000; 12,500; 13,000; 13,500; 14,000; 14,500; 15,000; 15,500; 16,000; 16,500; 17,000; 17,500; 18,000; 18,500; 19,000; 19,500; 20,000; 25,000; 30,000; 35,000; 40,000; 50,000; 55,000; 60,000; 65,000; 70,000; 75,000; 80,000; 85,000; 90,000; 95,000; or 100,000 kDa.

[0140] As noted above, the polyethylene glycol may have a branched structure. Branched polyethylene glycols are described, for example, in U.S. Pat. No. 5,643,575; Morpurgo et al., Appl. Biochem. Biotechnol. 56:59-72 (1996); Vorobjev et al., Nucleosides Nucleotides 18:2745-2750 (1999); and Caliceti et al., Bioconjug. Chem. 10:638-646 (1999), the disclosures of each of which are incorporated herein by reference.

[0141] The polyethylene glycol molecules (or other chemical moieties) should be attached to the protein with consideration of effects on functional or antigenic domains of the protein. There are a number of attachment methods available to those skilled in the art, e.g., EP 0 401 384, herein incorporated by reference (coupling PEG to G-CSF), see also Malik et al., Exp. Hematol. 20:1028-1035 (1992) (reporting pegylation of GM-CSF using tresyl chloride). For example, polyethylene glycol may be covalently bound through amino acid residues via a reactive group, such as, a free amino or carboxyl group. Reactive groups are those to which an activated polyethylene glycol molecule may be bound. The amino acid residues having a free amino group may include lysine residues and the N-terminal amino acid residues; those having a free carboxyl group may include aspartic acid residues glutamic acid residues and the C-terminal amino acid residue. Sulfhydryl groups may also be used as a reactive group for attaching the polyethylene glycol molecules. Preferred for therapeutic purposes is attachment at an amino group, such as attachment at the N-terminus or lysine group.

[0142] As suggested above, polyethylene glycol may be attached to proteins via linkage to any of a number of amino acid residues. For example, polyethylene glycol can be linked to a proteins via covalent bonds to lysine, histidine, aspartic acid, glutamic acid, or cysteine residues. One or more reaction chemistries may be employed to attach polyethylene glycol to specific amino acid residues (e.g., lysine, histidine, aspartic acid, glutamic acid, or cysteine) of the protein or to more than one type of amino acid residue (e.g., lysine, histidine, aspartic acid, glutamic acid, cysteine and combinations thereof) of the protein.

[0143] One may specifically desire proteins chemically modified at the N-terminus. Using polyethylene glycol as an illustration of the present composition, one may select from a variety of polyethylene glycol molecules (by molecular weight, branching, etc.), the proportion of polyethylene glycol molecules to protein (polypeptide) molecules in the reaction mix, the type of pegylation reaction to be performed, and the method of obtaining the selected N-terminally pegylated protein. The method of obtaining the N-terminally pegylated preparation (i.e., separating this moiety from other monopegylated moieties if necessary) may be by purification of the N-terminally pegylated material from a population of pegylated protein molecules. Selective proteins chemically modified at the N-terminus modification may be accomplished by reductive alkylation which exploits differential reactivity of different types of primary amino groups (lysine versus the N-terminal) available for derivatization in a particular protein. Under the appropriate reaction conditions, substantially selective derivatization of the protein at the N-terminus with a carbonyl group containing polymer is achieved.

[0144] As indicated above, pegylation of the proteins of the invention may be accomplished by any number of means. For example, polyethylene glycol may be attached to the protein either directly or by an intervening linker. Linkerless systems for attaching polyethylene glycol to proteins are described in Delgado et al., Crit. Rev. Thera. Drug Carrier Sys. 9:249-304 (1992); Francis et al., Intern. J. of Hematol. 68:1-18 (1998); U.S. Pat. No. 4,002,531; U.S. Pat. No. 5,349,052; WO 95/06058; and WO 98/32466, the disclosures of each of which are incorporated herein by reference.

[0145] One system for attaching polyethylene glycol directly to amino acid residues of proteins without an intervening linker employs tresylated MPEG, which is produced by the modification of monmethoxy polyethylene glycol (MPEG) using tresylchloride (CISO₂CH₂CF₃). Upon reaction of protein with tresylated MPEG, polyethylene glycol is directly attached to amine groups of the protein. Thus, the invention includes protein-polyethylene glycol conjugates produced by reacting proteins of the invention with a polyethylene glycol molecule having a 2,2,2-trifluoreothane sulphonyl group.

[0146] Polyethylene glycol can also be attached to proteins using a number of different intervening linkers. For example, U.S. Pat. No. 5,612,460, the entire disclosure of which is incorporated herein by reference, discloses urethane linkers for connecting polyethylene glycol to proteins. Protein-polyethylene glycol conjugates wherein the polyethylene glycol is attached to the protein by a linker can also be produced by reaction of proteins with compounds such as MPEG-succinimidylsuccinate, MPEG activated with 1,1′-carbonyldiimidazole, MPEG-2,4,5-trichloropenylcarbonate, MPEG-p-nitrophenolcarbonate, and various MPEG-succinate derivatives. A number additional polyethylene glycol derivatives and reaction chemistries for attaching polyethylene glycol to proteins are described in WO 98/32466, the entire disclosure of which is incorporated herein by reference. Pegylated protein products produced using the reaction chemistries set out herein are included within the scope of the invention.

[0147] The number of polyethylene glycol moieties attached to each protein of the invention (i.e., the degree of substitution) may also vary. For example, the pegylated proteins of the invention may be linked, on average, to 1, 2, 3, 4, 5, 6, 7, 8, 9, 10, 12, 15, 17, 20, or more polyethylene glycol molecules. Similarly, the average degree of substitution within ranges such as 1-3, 2-4, 3-5, 4-6, 5-7, 6-8, 7-9, 8-10, 9-11, 10-12, 11-13, 12-14, 13-15, 14-16, 15-17, 16-18, 17-19, or 18-20 polyethylene glycol moieties per protein molecule. Methods for determining the degree of substitution are discussed, for example, in Delgado et al., Crit. Rev. Thera. Drug Carrier Sys. 9:249-304 (1992).

[0148] The prostate cancer antigen polypeptides of the invention may be in monomers or multimers (i.e., dimers, trimers, tetramers and higher multimers). Accordingly, the present invention relates to monomers and multimers of the polypeptides of the invention, their preparation, and compositions (preferably, Therapeutics) containing them. In specific embodiments, the polypeptides of the invention are monomers, dimers, trimers or tetramers. In additional embodiments, the multimers of the invention are at least dimers, at least trimers, or at least tetramers.

[0149] Multimers encompassed by the invention may be homomers or heteromers. As used herein, the term homomer, refers to a multimer containing only polypeptides corresponding to the amino acid sequence of SEQ ID NO:Y or an amino acid sequence encoded by SEQ ID NO:X, and/or an amino acid sequence encoded by the cDNA in a related cDNA clone contained in a deposited library (including fragments, variants, splice variants, and fusion proteins, corresponding to any one of these as described herein). These homomers may contain polypeptides having identical or different amino acid sequences. In a specific embodiment, a homomer of the invention is a multimer containing only polypeptides having an identical amino acid sequence. In another specific embodiment, a homomer of the invention is a multimer containing polypeptides having different amino acid sequences. In specific embodiments, the multimer of the invention is a homodimer (e.g., containing polypeptides having identical or different amino acid sequences) or a homotrimer (e.g., containing polypeptides having identical and/or different amino acid sequences). In additional embodiments, the homomeric multimer of the invention is at least a homodimer, at least a homotrimer, or at least a homotetramer.

[0150] As used herein, the term heteromer refers to a multimer containing one or more heterologous polypeptides (i.e., polypeptides of different proteins) in addition to the polypeptides of the invention. In a specific embodiment, the multimer of the invention is a heterodimer, a heterotrimer, or a heterotetramer. In additional embodiments, the heteromeric multimer of the invention is at least a heterodimer, at least a heterotrimer, or at least a heterotetramer.

[0151] Multimers of the invention may be the result of hydrophobic, hydrophilic, ionic and/or covalent associations and/or may be indirectly linked, by for example, liposome formation. Thus, in one embodiment, multimers of the invention, such as, for example, homodimers or homotrimers, are formed when polypeptides of the invention contact one another in solution. In another embodiment, heteromultimers of the invention, such as, for example, heterotrimers or heterotetramers, are formed when polypeptides of the invention contact antibodies to the polypeptides of the invention (including antibodies to the heterologous polypeptide sequence in a fusion protein of the invention) in solution. In other embodiments, multimers of the invention are formed by covalent associations with and/or between the polypeptides of the invention. Such covalent associations may involve one or more amino acid residues contained in the polypeptide sequence (e.g., that recited in SEQ ID NO:Y, or contained in a polypeptide encoded by SEQ ID NO:X, and/or by the cDNA in the related cDNA clone contained in a deposited library). In one instance, the covalent associations are cross-linking between cysteine residues located within the polypeptide sequences which interact in the native (i.e., naturally occurring) polypeptide. In another instance, the covalent associations are the consequence of chemical or recombinant manipulation. Alternatively, such covalent associations may involve one or more amino acid residues contained in the heterologous polypeptide sequence in a fusion protein. In one example, covalent associations are between the heterologous sequence contained in a fusion protein of the invention (see, e.g., U.S. Pat. No. 5,478,925). In a specific example, the covalent associations are between the heterologous sequence contained in a Fc fusion protein of the invention (as described herein). In another specific example, covalent associations of fusion proteins of the invention are between heterologous polypeptide sequence from another protein that is capable of forming covalently associated multimers, such as for example, oseteoprotegerin (see, e.g., International Publication NO: WO 98/49305, the contents of which are herein incorporated by reference in its entirety). In another embodiment, two or more polypeptides of the invention are joined through peptide linkers. Examples include those peptide linkers described in U.S. Pat. No. 5,073,627 (hereby incorporated by reference). Proteins comprising multiple polypeptides of the invention separated by peptide linkers may be produced using conventional recombinant DNA technology.

[0152] Another method for preparing multimer polypeptides of the invention involves use of polypeptides of the invention fused to a leucine zipper or isoleucine zipper polypeptide sequence. Leucine zipper and isoleucine zipper domains are polypeptides that promote multimerization of the proteins in which they are found. Leucine zippers were originally identified in several DNA-binding proteins (Landschulz et al., Science 240:1759, (1988)), and have since been found in a variety of different proteins. Among the known leucine zippers are naturally occurring peptides and derivatives thereof that dimerize or trimerize. Examples of leucine zipper domains suitable for producing soluble multimeric proteins of the invention are those described in PCT application WO 94/10308, hereby incorporated by reference. Recombinant fusion proteins comprising a polypeptide of the invention fused to a polypeptide sequence that dimerizes or trimerizes in solution are expressed in suitable host cells, and the resulting soluble multimeric fusion protein is recovered from the culture supernatant using techniques known in the art.

[0153] Trimeric polypeptides of the invention may offer the advantage of enhanced biological activity. Preferred leucine zipper moieties and isoleucine moieties are those that preferentially form trimers. One example is a leucine zipper derived from lung surfactant protein D (SPD), as described in Hoppe et al. (FEBS Letters 344:191, (1994)) and in U.S. patent application Ser. No. 08/446,922, hereby incorporated by reference. Other peptides derived from naturally occurring trimeric proteins may be employed in preparing trimeric polypeptides of the invention.

[0154] In another example, proteins of the invention are associated by interactions between Flag® polypeptide sequence contained in fusion proteins of the invention containing Flag® polypeptide seuqence. In a further embodiment, associations proteins of the invention are associated by interactions between heterologous polypeptide sequence contained in Flag® fusion proteins of the invention and anti-Flag® antibody.

[0155] The multimers of the invention may be generated using chemical techniques known in the art. For example, polypeptides desired to be contained in the multimers of the invention may be chemically cross-linked using linker molecules and linker molecule length optimization techniques known in the art (see, e.g., U.S. Pat. No. 5,478,925, which is herein incorporated by reference in its entirety). Additionally, multimers of the invention may be generated using techniques known in the art to form one or more inter-molecule cross-links between the cysteine residues located within the sequence of the polypeptides desired to be contained in the multimer (see, e.g., U.S. Pat. No. 5,478,925, which is herein incorporated by reference in its entirety). Further, polypeptides of the invention may be routinely modified by the addition of cysteine or biotin to the C-terminus or N-terminus of the polypeptide and techniques known in the art may be applied to generate multimers containing one or more of these modified polypeptides (see, e.g., U.S. Pat. No. 5,478,925, which is herein incorporated by reference in its entirety). Additionally, techniques known in the art may be applied to generate liposomes containing the polypeptide components desired to be contained in the multimer of the invention (see, e.g., U.S. Pat. No. 5,478,925, which is herein incorporated by reference in its entirety).

[0156] Alternatively, multimers of the invention may be generated using genetic engineering techniques known in the art. In one embodiment, polypeptides contained in multimers of the invention are produced recombinantly using fusion protein technology described herein or otherwise known in the art (see, e.g., U.S. Pat. No. 5,478,925, which is herein incorporated by reference in its entirety). In a specific embodiment, polynucleotides coding for a homodimer of the invention are generated by ligating a polynucleotide sequence encoding a polypeptide of the invention to a sequence encoding a linker polypeptide and then further to a synthetic polynucleotide encoding the translated product of the polypeptide in the reverse orientation from the original C-terminus to the N-terminus (lacking the leader sequence) (see, e.g., U.S. Pat. No. 5,478,925, which is herein incorporated by reference in its entirety). In another embodiment, recombinant techniques described herein or otherwise known in the art are applied to generate recombinant polypeptides of the invention which contain a transmembrane domain (or hyrophobic or signal peptide) and which can be incorporated by membrane reconstitution techniques into liposomes (see, e.g., U.S. Pat. No. 5,478,925, which is herein incorporated by reference in its entirety).

[0157] Antibodies

[0158] Further polypeptides of the invention relate to antibodies and T-cell antigen receptors (TCR) which immunospecifically bind a polypeptide, polypeptide fragment, or variant of SEQ ID NO:Y, and/or an epitope, of the present invention (as determined by immunoassays well known in the art for assaying specific antibody-antigen binding). Antibodies of the invention include, but are not limited to, polyclonal, monoclonal, multispecific, human, humanized or chimeric antibodies, single chain antibodies, Fab fragments, F(ab′) fragments, fragments produced by a Fab expression library, anti-idiotypic (anti-Id) antibodies (including, e.g., anti-Id antibodies to antibodies of the invention), and epitope-binding fragments of any of the above. The term “antibody,” as used herein, refers to immunoglobulin molecules and immunologically active portions of immunoglobulin molecules, i.e., molecules that contain an antigen binding site that immunospecifically binds an antigen. The immunoglobulin molecules of the invention can be of any type (e.g., IgG, IgE, IgM, IgD, IgA and IgY), class (e.g., IgG1, IgG2, IgG3, IgG4, IgA1 and IgA2) or subclass of immunoglobulin molecule.

[0159] Most preferably the antibodies are human antigen-binding antibody fragments of the present invention and include, but are not limited to, Fab, Fab′ and F(ab′)2, Fd, single-chain Fvs (scFv), single-chain antibodies, disulfide-linked Fvs (sdFv) and fragments comprising either a VL or VH domain. Antigen-binding antibody fragments, including single-chain antibodies, may comprise the variable region(s) alone or in combination with the entirety or a portion of the following: hinge region, CH1, CH2, and CH3 domains. Also included in the invention are antigen-binding fragments also comprising any combination of variable region(s) with a hinge region, CH1, CH2, and CB3 domains. The antibodies of the invention may be from any animal origin including birds and mammals. Preferably, the antibodies are human, murine (e.g., mouse and rat), donkey, ship rabbit, goat, guinea pig, camel, horse, or chicken. As used herein, “human” antibodies include antibodies having the amino acid sequence of a human immunoglobulin and include antibodies isolated from human immunoglobulin libraries or from animals transgenic for one or more human immunoglobulin and that do not express endogenous immunoglobulins, as described infra and, for example in, U.S. Pat. No. 5,939,598 by Kucherlapati et al.

[0160] The antibodies of the present invention may be monospecific, bispecific, trispecific or of greater multispecificity. Multispecific antibodies may be specific for different epitopes of a polypeptide of the present invention or may be specific for both a polypeptide of the present invention as well as for a heterologous epitope, such as a heterologous polypeptide or solid support material. See, e.g., PCT publications WO 93/17715; WO 92/08802; WO 91/00360; WO 92/05793; Tutt, et al., J. Immunol. 147:60-69 (1991); U.S. Pat. Nos. 4,474,893; 4,714,681; 4,925,648; 5,573,920; 5,601,819; Kostelny et al., J. Immunol. 148:1547-1553 (1992).

[0161] Antibodies of the present invention may be described or specified in terms of the epitope(s) or portion(s) of a polypeptide of the present invention which they recognize or specifically bind. The epitope(s) or polypeptide portion(s) may be specified as described herein, e.g., by N-terminal and C-terminal positions, or by size in contiguous amino acid residues. Antibodies which specifically bind any epitope or polypeptide of the present invention may also be excluded. Therefore, the present invention includes antibodies that specifically bind polypeptides of the present invention, and allows for the exclusion of the same.

[0162] Antibodies of the present invention may also be described or specified in terms of their cross-reactivity. Antibodies that do not bind any other analog, ortholog, or homolog of a polypeptide of the present invention are included. Antibodies that bind polypeptides with at least 95%, at least 90%, at least 85%, at least 80%, at least 75%, at least 70%, at least 65%, at least 60%, at least 55%, and at least 50% identity (as calculated using methods known in the art and described herein) to a polypeptide of the present invention are also included in the present invention. In specific embodiments, antibodies of the present invention cross-react with murine, rat and/or rabbit homologs of human proteins and the corresponding epitopes thereof. Antibodies that do not bind polypeptides with less than 95%, less than 90%, less than 85%, less than 80%, less than 75%, less than 70%, less than 65%, less than 60%, less than 55%, and less than 50% identity (as calculated using methods known in the art and described herein) to a polypeptide of the present invention are also included in the present invention. In a specific embodiment, the above-described cross-reactivity is with respect to any single specific antigenic or immunogenic polypeptide, or combination(s) of 2, 3, 4, 5, or more of the specific antigenic and/or immunogenic polypeptides disclosed herein. Further included in the present invention are antibodies which bind polypeptides encoded by polynucleotides which hybridize to a polynucleotide of the present invention under stringent hybridization conditions (as described herein). Antibodies of the present invention may also be described or specified in terms of their binding affinity to a polypeptide of the invention. Preferred binding affinities include those with a dissociation constant or Kd less than 5×10² M, 10² M, 5×10³ M, 10³ M, 5×10⁻⁴ M, 10⁻⁴ M, 5×10⁵ M, 10⁵ M, 5×10⁶ M, 10⁻⁶M, 5×10⁻⁷ M, 10⁷ M, 5×10⁻⁸ M, 10⁻⁸ M, 5×10⁻⁹ M, 10⁻⁹ M, 5×10⁻¹⁰ M, 10⁻¹⁰ M, 5×10⁻¹¹ M, 10⁻¹¹ M, 5×10⁻¹² M, ¹⁰⁻¹²M, 5×10⁻¹³ M, 10⁻¹³ M, 5×10⁻¹⁴ M, 10⁻¹⁴ M, 5×10⁻¹⁵ M, or ¹⁰⁻¹⁵M.

[0163] The invention also provides antibodies that competitively inhibit binding of an antibody to an epitope of the invention as determined by any method known in the art for determining competitive binding, for example, the immunoassays described herein. In preferred embodiments, the antibody competitively inhibits binding to the epitope by at least 95%, at least 90%, at least 85 %, at least 80%, at least 75%, at least 70%, at least 60%, or at least 50%.

[0164] Antibodies of the present invention may act as agonists or antagonists of the polypeptides of the present invention. For example, the present invention includes antibodies which disrupt the receptor/ligand interactions with the polypeptides of the invention either partially or fully. Preferrably, antibodies of the present invention bind an antigenic epitope disclosed herein, or a portion thereof. The invention features both receptor-specific antibodies and ligand-specific antibodies. The invention also features receptor-specific antibodies which do not prevent ligand binding but prevent receptor activation. Receptor activation (i.e., signaling) may be determined by techniques described herein or otherwise known in the art. For example, receptor activation can be determined by detecting the phosphorylation (e.g., tyrosine or serine/threonine) of the receptor or its substrate by immunoprecipitation followed by western blot analysis (for example, as described supra). In specific embodiments, antibodies are provided that inhibit ligand activity or receptor activity by at least 95%, at least 90%, at least 85%, at least 80%, at least 75%, at least 70%, at least 60%, or at least 50% of the activity in absence of the antibody.

[0165] The invention also features receptor-specific antibodies which both prevent ligand binding and receptor activation as well as antibodies that recognize the receptor-ligand complex, and, preferably, do not specifically recognize the unbound receptor or the unbound ligand. Likewise, included in the invention are neutralizing antibodies which bind the ligand and prevent binding of the ligand to the receptor, as well as antibodies which bind the ligand, thereby preventing receptor activation, but do not prevent the ligand from binding the receptor. Further included in the invention are antibodies which activate the receptor. These antibodies may act as receptor agonists, i.e., potentiate or activate either all or a subset of the biological activities of the ligand-mediated receptor activation, for example, by inducing dimerization of the receptor. The antibodies may be specified as agonists, antagonists or inverse agonists for biological activities comprising the specific biological activities of the peptides of the invention disclosed herein. The above antibody agonists can be made using methods known in the art. See, e.g., PCT publication WO 96/40281; U.S. Pat. No. 5,811,097; Deng et al., Blood 92(6):1981-1988 (1998); Chen et al., Cancer Res. 58(16):3668-3678 (1998); Harrop et al., J. Immunol. 161(4):1786-1794 (1998); Zhu et al., Cancer Res. 58(15):3209-3214 (1998); Yoon et al., J. Immunol. 160(7):3170-3179 (1998); Prat et al., J. Cell. Sci. 111(Pt2):237-247 (1998); Pitard et al., J. Immunol. Methods 205(2):177-190 (1997); Liautard et al., Cytokine 9(4):233-241 (1997); Carlson et al., J. Biol. Chem. 272(17):11295-11301 (1997); Taryman et al., Neuron 14(4):755-762 (1995); Muller et al., Structure 6(9):1153-1167 (1998); Bartunek et al., Cytokine 8(1):14-20 (1996) (which are all incorporated by reference herein in their entireties).

[0166] Antibodies of the present invention may be used, for example, but not limited to, to purify, detect, and target the polypeptides of the present invention, including both in vitro and in vivo diagnostic and therapeutic methods. For example, the antibodies have use in immunoassays for qualitatively and quantitatively measuring levels of the polypeptides of the present invention in biological samples. See, e.g., Harlow et al., Antibodies: A Laboratory Manual, (Cold Spring Harbor Laboratory Press, 2nd ed. 1988) (incorporated by reference herein in its entirety).

[0167] As discussed in more detail below, the antibodies of the present invention may be used either alone or in combination with other compositions. The antibodies may further be recombinantly fused to a heterologous polypeptide at the N- or C-terminus or chemically conjugated (including covalently and non-covalently conjugations) to polypeptides or other compositions. For example, antibodies of the present invention may be recombinantly fused or conjugated to molecules useful as labels in detection assays and effector molecules such as heterologous polypeptides, drugs, radionuclides, or toxins. See, e.g., PCT publications WO 92/08495; WO 91/14438; WO 89/12624; U.S. Pat. No. 5,314,995; and EP 396,387.

[0168] The antibodies of the invention include derivatives that are modified, i.e, by the covalent attachment of any type of molecule to the antibody such that covalent attachment does not prevent the antibody from generating an anti-idiotypic response. For example, but not by way of limitation, the antibody derivatives include antibodies that have been modified, e.g., by glycosylation, acetylation, pegylation, phosphylation, amidation, derivatization by known protecting/blocking groups, proteolytic cleavage, linkage to a cellular ligand or other protein, etc. Any of numerous chemical modifications may be carried out by known techniques, including, but not limited to specific chemical cleavage, acetylation, formylation, metabolic synthesis of tunicamycin, etc. Additionally, the derivative may contain one or more non-classical amino acids.

[0169] The antibodies of the present invention may be generated by any suitable method known in the art. Polyclonal antibodies to an antigen-of-interest can be produced by various procedures well known in the art. For example, a polypeptide of the invention can be administered to various host animals including, but not limited to, rabbits, mice, rats, etc. to induce the production of sera containing polyclonal antibodies specific for the antigen. Various adjuvants may be used to increase the immunological response, depending on the host species, and include but are not limited to, Freund's (complete and incomplete), mineral gels such as aluminum hydroxide, surface active substances such as lysolecithin, pluronic polyols, polyanions, peptides, oil emulsions, keyhole limpet hemocyanins, dinitrophenol, and potentially useful human adjuvants such as BCG (bacille Calmette-Guerin) and corynebacterium parvum. Such adjuvants are also well known in the art.

[0170] Monoclonal antibodies can be prepared using a wide variety of techniques known in the art including the use of hybridoma, recombinant, and phage display technologies, or a combination thereof. For example, monoclonal antibodies can be produced using hybridoma techniques including those known in the art and taught, for example, in Harlow et al., Antibodies: A Laboratory Manual, (Cold Spring Harbor Laboratory Press, 2nd ed. 1988); Hammerling, et al., in: Monoclonal Antibodies and T-Cell Hybridomas 563-681 (Elsevier, N.Y., 1981) (said references incorporated by reference in their entireties). The term “monoclonal antibody” as used herein is not limited to antibodies produced through hybridoma technology. The term “monoclonal antibody” refers to an antibody that is derived from a single clone, including any eukaryotic, prokaryotic, or phage clone, and not the method by which it is produced.

[0171] Methods for producing and screening for specific antibodies using hybridoma technology are routine and well known in the art and are discussed in detail in the Examples. In a non-limiting example, mice can be immunized with a polypeptide of the invention or a cell expressing such peptide. Once an immune response is detected, e.g., antibodies specific for the antigen are detected in the mouse serum, the mouse spleen is harvested and splenocytes isolated. The splenocytes are then fused by well known techniques to any suitable myeloma cells, for example cells from cell line SP20 available from the ATCC. Hybridomas are selected and cloned by limited dilution. The hybridoma clones are then assayed by methods known in the art for cells that secrete antibodies capable of binding a polypeptide of the invention. Ascites fluid, which generally contains high levels of antibodies, can be generated by immunizing mice with positive hybridoma clones.

[0172] Accordingly, the present invention provides methods of generating monoclonal antibodies as well as antibodies produced by the method comprising culturing a hybridoma cell secreting an antibody of the invention wherein, preferably, the hybridoma is generated by fusing splenocytes isolated from a mouse immunized with an antigen of the invention with myeloma cells and then screening the hybridomas resulting from the fusion for hybridoma clones that secrete an antibody able to bind a polypeptide of the invention.

[0173] Antibody fragments which recognize specific epitopes may be generated by known techniques. For example, Fab and F(ab′)2 fragments of the invention may be produced by proteolytic cleavage of immunoglobulin molecules, using enzymes such as papain (to produce Fab fragments) or pepsin (to produce F(ab′)2 fragments). F(ab′)2 fragments contain the variable region, the light chain constant region and the CH1 domain of the heavy chain.

[0174] For example, the antibodies of the present invention can also be generated using various phage display methods known in the art. In phage display methods, functional antibody domains are displayed on the surface of phage particles which carry the polynucleotide sequences encoding them. In a particular embodiment, such phage can be utilized to display antigen binding domains expressed from a repertoire or combinatorial antibody library (e.g., human or murine). Phage expressing an antigen binding domain that binds the antigen of interest can be selected or identified with antigen, e.g., using labeled antigen or antigen bound or captured to a solid surface or bead. Phage used in these methods are typically filamentous phage including fd and M13 binding domains expressed from phage with Fab, Fv or disulfide stabilized Fv antibody domains recombinantly fused to either the phage gene III or gene VIII protein. Examples of phage display methods that can be used to make the antibodies of the present invention include those disclosed in Brinkman et al., J. Immunol. Methods 182:41-50 (1995); Ames et al., J. Immunol. Methods 184:177-186 (1995); Kettleborough et al., Eur. J. Immunol. 24:952-958 (1994); Persic et al., Gene 187 9-18 (1997); Burton et al., Advances in Immunology 57:191-280 (1994); PCT application No. PCT/GB91/01134; PCT publications WO 90/02809; WO 91/10737; WO 92/01047; WO 92/18619; WO 93/11236; WO 95/15982; WO 95/20401; and U.S. Pat. Nos. 5,698,426; 5,223,409; 5,403,484; 5,580,717; 5,427,908; 5,750,753; 5,821,047; 5,571,698; 5,427,908; 5,516,637; 5,780,225; 5,658,727; 5,733,743 and 5,969,108; each of which is incorporated herein by reference in its entirety.

[0175] As described in the above references, after phage selection, the antibody coding regions from the phage can be isolated and used to generate whole antibodies, including human antibodies, or any other desired antigen binding fragment, and expressed in any desired host, including mammalian cells, insect cells, plant cells, yeast, and bacteria, e.g., as described in detail below. For example, techniques to recombinantly produce Fab, Fab′ and F(ab′)2 fragments can also be employed using methods known in the art such as those disclosed in PCT publication WO 92/22324; Mullinax et al., BioTechniques 12(6):864-869 (1992); and Sawai et al., AJRI 34:26-34 (1995); and Better et al., Science 240:1041-1043 (1988) (said references incorporated by reference in their entireties).

[0176] Examples of techniques which can be used to produce single-chain Fvs and antibodies include those described in U.S. Pat. Nos. 4,946,778 and 5,258,498; Huston et al., Methods in Enzymology 203:46-88 (1991); Shu et al., PNAS 90:7995-7999 (1993); and Skerra et al., Science 240:1038-1040 (1988). For some uses, including in vivo use of antibodies in humans and in vitro detection assays, it may be preferable to use chimeric, humanized, or human antibodies. A chimeric antibody is a molecule in which different portions of the antibody are derived from different animal species, such as antibodies having a variable region derived from a murine monoclonal antibody and a human immunoglobulin constant region. Methods for producing chimeric antibodies are known in the art. See e.g., Morrison, Science 229:1202 (1985); Oi et al., BioTechniques 4:214 (1986); Gillies et al., (1989) J. Immunol. Methods 125:191-202; U.S. Pat. Nos. 5,807,715; 4,816,567; and 4,816,397, which are incorporated herein by reference in their entirety. Humanized antibodies are antibody molecules from non-human species antibody that binds the desired antigen having one or more complementarity determining regions (CDRs) from the non-human species and a framework regions from a human immunoglobulin molecule. Often, framework residues in the human framework regions will be substituted with the corresponding residue from the CDR donor antibody to alter, preferably improve, antigen binding. These framework substitutions are identified by methods well known in the art, e.g., by modeling of the interactions of the CDR and framework residues to identify framework residues important for antigen binding and sequence comparison to identify unusual framework residues at particular positions. (See, e.g., Queen et al., U.S. Pat. No. 5,585,089; Riechmann et al., Nature 332:323 (1988), which are incorporated herein by reference in their entireties.) Antibodies can be humanized using a variety of techniques known in the art including, for example, CDR-grafting (EP 239,400; PCT publication WO 91/09967; U.S. Pat. Nos. 5,225,539; 5,530,101; and 5,585,089), veneering or resurfacing (EP 592,106; EP 519,596; Padlan, Molecular Immunology 28(4/5):489-498 (1991); Studnicka et al., Protein Engineering 7(6):805-814 (1994); Roguska. et al., PNAS 91:969-973 (1994)), and chain shuffling (U.S. Pat. No. 5,565,332).

[0177] Completely human antibodies are particularly desirable for therapeutic treatment of human patients. Human antibodies can be made by a variety of methods known in the art including phage display methods described above using antibody libraries derived from human immunoglobulin sequences. See also, U.S. Pat. Nos. 4,444,887 and 4,716,111; and PCT publications WO 98/46645, WO 98/50433, WO 98/24893, WO 98/16654, WO 96/34096, WO 96/33735, and WO 91/10741; each of which is incorporated herein by reference in its entirety.

[0178] Human antibodies can also be produced using transgenic mice which are incapable of expressing functional endogenous immunoglobulins, but which can express human immunoglobulin genes. For example, the human heavy and light chain immunoglobulin gene complexes may be introduced randomly or by homologous recombination into mouse embryonic stem cells. Alternatively, the human variable region, constant region, and diversity region may be introduced into mouse embryonic stem cells in addition to the human heavy and light chain genes. The mouse heavy and light chain immunoglobulin genes may be rendered non-functional separately or simultaneously with the introduction of human immunoglobulin loci by homologous recombination. In particular, homozygous deletion of the JH region prevents endogenous antibody production. The modified embryonic stem cells are expanded and microinjected into blastocysts to produce chimeric mice. The chimeric mice are then bred to produce homozygous offspring which express human antibodies. The transgenic mice are immunized in the normal fashion with a selected antigen, e.g., all or a portion of a polypeptide of the invention. Monoclonal antibodies directed against the antigen can be obtained from the immunized, transgenic mice using conventional hybridoma technology. The human immunoglobulin transgenes harbored by the transgenic mice rearrange during B cell differentiation, and subsequently undergo class switching and somatic mutation. Thus, using such a technique, it is possible to produce therapeutically useful IgG, IgA, IgM and IgE antibodies. For an overview of this technology for producing human antibodies, see Lonberg and Huszar, Int. Rev. Immunol. 13:65-93 (1995). For a detailed discussion of this technology for producing human antibodies and human monoclonal antibodies and protocols for producing such antibodies, see, e.g., PCT publications WO 98/24893; WO 92/01047; WO 96/34096; WO 96/33735; European Patent No. 0 598 877; U.S. Pat. Nos. 5,413,923; 5,625,126; 5,633,425; 5,569,825; 5,661,016; 5,545,806; 5,814,318; 5,885,793; 5,916,771; and 5,939,598, which are incorporated by reference herein in their entirety. In addition, companies such as Abgenix, Inc. (Freemont, Calif.) and Genpharm (San Jose, Calif.) can be engaged to provide human antibodies directed against a selected antigen using technology similar to that described above.

[0179] Completely human antibodies which recognize a selected epitope can be generated using a technique referred to as “guided selection.” In this approach a selected non-human monoclonal antibody, e.g., a mouse antibody, is used to guide the selection of a completely human antibody recognizing the same epitope. (Jespers et al., Bio/technology 12:899-903 (1988)).

[0180] Further, antibodies to the polypeptides of the invention can, in turn, be utilized to generate anti-idiotype antibodies that “mimic” polypeptides of the invention using techniques well known to those skilled in the art. (See, e.g., Greenspan & Bona, FASEB J. 7(5):437-444; (1989) and Nissinoff, J. Immunol. 147(8):2429-2438 (1991)). For example, antibodies which bind to and competitively inhibit polypeptide multimerization and/or binding of a polypeptide of the invention to a ligand can be used to generate anti-idiotypes that “mimic” the polypeptide multimerization and/or binding domain and, as a consequence, bind to and neutralize polypeptide and/or its ligand. Such neutralizing anti-idiotypes or Fab fragments of such anti-idiotypes can be used in therapeutic regimens to neutralize polypeptide ligand. For example, such anti-idiotypic antibodies can be used to bind a polypeptide of the invention and/or to bind its ligands/receptors, and thereby block its biological activity.

[0181] Polynucleotides Encoding Antibodies

[0182] The invention further provides polynucleotides comprising a nucleotide sequence encoding an antibody of the invention and fragments thereof. The invention also encompasses polynucleotides that hybridize under stringent or alternatively, under lower stringency hybridization conditions, e.g., as defined supra, to polynucleotides that encode an antibody, preferably, that specifically binds to a polypeptide of the invention, preferably, an antibody that binds to a polypeptide having the amino acid sequence of SEQ ID NO:Y.

[0183] The polynucleotides may be obtained, and the nucleotide sequence of the polynucleotides determined, by any method known in the art. For example, if the nucleotide sequence of the antibody is known, a polynucleotide encoding the antibody may be assembled from chemically synthesized oligonucleotides (e.g., as described in Kutmeier et al., BioTechniques 17:242 (1994)), which, briefly, involves the synthesis of overlapping oligonucleotides containing portions of the sequence encoding the antibody, annealing and ligating of those oligonucleotides, and then amplification of the ligated oligonucleotides by PCR.

[0184] Alternatively, a polynucleotide encoding an antibody may be generated from nucleic acid from a suitable source. If a clone containing a nucleic acid encoding a particular antibody is not available, but the sequence of the antibody molecule is known, a nucleic acid encoding the immunoglobulin may be chemically synthesized or obtained from a suitable source (e.g., an antibody cDNA library, or a cDNA library generated from, or nucleic acid, preferably poly A+ RNA, isolated from, any tissue or cells expressing the antibody, such as hybridoma cells selected to express an antibody of the invention) by PCR amplification using synthetic primers hybridizable to the 3′ and 5′ ends of the sequence or by cloning using an oligonucleotide probe specific for the particular gene sequence to identify, e.g., a cDNA clone from a cDNA library that encodes the antibody. Amplified nucleic acids generated by PCR may then be cloned into replicable cloning vectors using any method well known in the art.

[0185] Once the nucleotide sequence and corresponding amino acid sequence of the antibody is determined, the nucleotide sequence of the antibody may be manipulated using methods well known in the art for the manipulation of nucleotide sequences, e.g., recombinant DNA techniques, site directed mutagenesis, PCR, etc. (see, for example, the techniques described in Sambrook et al., 1990, Molecular Cloning, A Laboratory Manual, 2d Ed., Cold Spring Harbor Laboratory, Cold Spring Harbor, N.Y. and Ausubel et al., eds., 1998, Current Protocols in Molecular Biology, John Wiley & Sons, NY, which are both incorporated by reference herein in their entireties ), to generate antibodies having a different amino acid sequence, for example to create amino acid substitutions, deletions, and/or insertions.

[0186] In a specific embodiment, the amino acid sequence of the heavy and/or light chain variable domains may be inspected to identify the sequences of the complementarity determining regions (CDRs) by methods that are well know in the art, e.g., by comparison to known amino acid sequences of other heavy and light chain variable regions to determine the regions of sequence hypervariability. Using routine recombinant DNA techniques, one or more of the CDRs may be inserted within framework regions, e.g., into human framework regions to humanize a non-human antibody, as described supra. The framework regions may be naturally occurring or consensus framework regions, and preferably human framework regions (see, e.g., Chothia et al., J. Mol. Biol. 278: 457-479 (1998) for a listing of human framework regions). Preferably, the polynucleotide generated by the combination of the framework regions and CDRs encodes an antibody that specifically binds a polypeptide of the invention. Preferably, as discussed supra, one or more amino acid substitutions may be made within the framework regions, and, preferably, the amino acid substitutions improve binding of the antibody to its antigen. Additionally, such methods may be used to make amino acid substitutions or deletions of one or more variable region cysteine residues participating in an intrachain disulfide bond to generate antibody molecules lacking one or more intrachain disulfide bonds. Other alterations to the polynucleotide are encompassed by the present invention and within the skill of the art.

[0187] In addition, techniques developed for the production of “chimeric antibodies” (Morrison et al., Proc. Natl. Acad. Sci. 81:851-855 (1984); Neuberger et al., Nature 312:604-608 (1984); Takeda et al., Nature 314:452-454 (1985)) by splicing genes from a mouse antibody molecule of appropriate antigen specificity together with genes from a human antibody molecule of appropriate biological activity can be used. As described supra, a chimeric antibody is a molecule in which different portions are derived from different animal species, such as those having a variable region derived from a murine mAb and a human immunoglobulin constant region, e.g., humanized antibodies.

[0188] Alternatively, techniques described for the production of single chain antibodies (U.S. Pat. No. 4,946,778; Bird, Science 242:423-42 (1988); Huston et al., Proc. Natl. Acad. Sci. USA 85:5879-5883 (1988); and Ward et al., Nature 334:544-54 (1989)) can be adapted to produce single chain antibodies. Single chain antibodies are formed by linking the heavy and light chain fragments of the Fv region via an amino acid bridge, resulting in a single chain polypeptide. Techniques for the assembly of functional Fv fragments in E. coli may also be used (Skerra et al., Science 242:1038-1041 (1988)).

[0189] Methods of Producing Antibodies

[0190] The antibodies of the invention can be produced by any method known in the art for the synthesis of antibodies, in particular, by chemical synthesis or preferably, by recombinant expression techniques.

[0191] Recombinant expression of an antibody of the invention, or fragment, derivative or analog thereof, (e.g., a heavy or light chain of an antibody of the invention or a single chain antibody of the invention), requires construction of an expression vector containing a polynucleotide that encodes the antibody. Once a polynucleotide encoding an antibody molecule or a heavy or light chain of an antibody, or portion thereof (preferably containing the heavy or light chain variable domain), of the invention has been obtained, the vector for the production of the antibody molecule may be produced by recombinant DNA technology using techniques well known in the art. Thus, methods for preparing a protein by expressing a polynucleotide containing an antibody encoding nucleotide sequence are described herein. Methods which are well known to those skilled in the art can be used to construct expression vectors containing antibody coding sequences and appropriate transcriptional and translational control signals. These methods include, for example, in vitro recombinant DNA techniques, synthetic techniques, and in vivo genetic recombination. The invention, thus, provides replicable vectors comprising a nucleotide sequence encoding an antibody molecule of the invention, or a heavy or light chain thereof, or a heavy or light chain variable domain, operably linked to a promoter. Such vectors may include the nucleotide sequence encoding the constant region of the antibody molecule (see, e.g., PCT Publication WO 86/05807; PCT Publication WO 89/01036; and U.S. Pat. No. 5,122,464) and the variable domain of the antibody may be cloned into such a vector for expression of the entire heavy or light chain.

[0192] The expression vector is transferred to a host cell by conventional techniques and the transfected cells are then cultured by conventional techniques to produce an antibody of the invention. Thus, the invention includes host cells containing a polynucleotide encoding an antibody of the invention, or a heavy or light chain thereof, or a single chain antibody of the invention, operably linked to a heterologous promoter. In preferred embodiments for the expression of double-chained antibodies, vectors encoding both the heavy and light chains may be co-expressed in the host cell for expression of the entire immunoglobulin molecule, as detailed below.

[0193] A variety of host-expression vector systems may be utilized to express the antibody molecules of the invention. Such host-expression systems represent vehicles by which the coding sequences of interest may be produced and subsequently purified, but also represent cells which may, when transformed or transfected with the appropriate nucleotide coding sequences, express an antibody molecule of the invention in situ. These include but are not limited to microorganisms such as bacteria (e.g., E. coli, B. subtilis) transformed with recombinant bacteriophage DNA, plasmid DNA or cosmid DNA expression vectors containing antibody coding sequences; yeast (e.g., Saccharomyces, Pichia) transformed with recombinant yeast expression vectors containing antibody coding sequences; insect cell systems infected with recombinant virus expression vectors (e.g., baculovirus) containing antibody coding sequences; plant cell systems infected with recombinant virus expression vectors (e.g., cauliflower mosaic virus, CaMV; tobacco mosaic virus, TMV) or transformed with recombinant plasmid expression vectors (e.g., Ti plasmid) containing antibody coding sequences; or mammalian cell systems (e.g., COS, CHO, BHK, 293, 3T3 cells) harboring recombinant expression constructs containing promoters derived from the genome of mammalian cells (e.g., metallothionein promoter) or from mammalian viruses (e.g., the adenovirus late promoter; the vaccinia virus 7.5K promoter). Preferably, bacterial cells such as Escherichia coli, and more preferably, eukaryotic cells, especially for the expression of whole recombinant antibody molecule, are used for the expression of a recombinant antibody molecule. For example, mammalian cells such as Chinese hamster ovary cells (CHO), in conjunction with a vector such as the major intermediate early gene promoter element from human cytomegalovirus is an effective expression system for antibodies (Foecking et al., Gene 45:101 (1986); Cockett et al., Bio/Technology 8:2 (1990)).

[0194] In bacterial systems, a number of expression vectors may be advantageously selected depending upon the use intended for the antibody molecule being expressed. For example, when a large quantity of such a protein is to be produced, for the generation of pharmaceutical compositions of an antibody molecule, vectors which direct the expression of high levels of fusion protein products that are readily purified may be desirable. Such vectors include, but are not limited, to the E. coli expression vector pUR278 (Ruther et al., EMBO J. 2:1791 (1983)), in which the antibody coding sequence may be ligated individually into the vector in frame with the lac Z coding region so that a fusion protein is produced; pIN vectors (Inouye & Inouye, Nucleic Acids Res. 13:3101-3109 (1985); Van Heeke & Schuster, J. Biol. Chem. 24:5503-5509 (1989)); and the like. pGEX vectors may also be used to express foreign polypeptides as fusion proteins with glutathione S-transferase (GST). In general, such fusion proteins are soluble and can easily be purified from lysed cells by adsorption and binding to matrix glutathione-agarose beads followed by elution in the presence of free glutathione. The pGEX vectors are designed to include thrombin or factor Xa protease cleavage sites so that the cloned target gene product can be released from the GST moiety.

[0195] In an insect system, Autographa califomica nuclear polyhedrosis virus (AcNPV) is used as a vector to express foreign genes. The virus grows in Spodoptera frugiperda cells. The antibody coding sequence may be cloned individually into non-essential regions (for example the polyhedrin gene) of the virus and placed under control of an AcNPV promoter (for example the polyhedrin promoter).

[0196] In mammalian host cells, a number of viral-based expression systems may be utilized. In cases where an adenovirus is used as an expression vector, the antibody coding sequence of interest may be ligated to an adenovirus transcription/translation control complex, e.g., the late promoter and tripartite leader sequence. This chimeric gene may then be inserted in the adenovirus genome by in vitro or in vivo recombination. Insertion in a non-essential region of the viral genome (e.g., region E1 or E3) will result in a recombinant virus that is viable and capable of expressing the antibody molecule in infected hosts. (e.g., see Logan & Shenk, Proc. Natl. Acad. Sci. USA 81:355-359 (1984)). Specific initiation signals may also be required for efficient translation of inserted antibody coding sequences. These signals include the ATG initiation codon and adjacent sequences. Furthermore, the initiation codon must be in phase with the reading frame of the desired coding sequence to ensure translation of the entire insert. These exogenous translational control signals and initiation codons can be of a variety of origins, both natural and synthetic. The efficiency of expression may be enhanced by the inclusion of appropriate transcription enhancer elements, transcription terminators, etc. (see Bittner et al., Methods in Enzymol. 153:51-544 (1987)).

[0197] In addition, a host cell strain may be chosen which modulates the expression of the inserted sequences, or modifies and processes the gene product in the specific fashion desired. Such modifications (e.g., glycosylation) and processing (e.g., cleavage) of protein products may be important for the function of the protein. Different host cells have characteristic and specific mechanisms for the post-translational processing and modification of proteins and gene products. Appropriate cell lines or host systems can be chosen to ensure the correct modification and processing of the foreign protein expressed. To this end, eukaryotic host cells which possess the cellular machinery for proper processing of the primary transcript, glycosylation, and phosphorylation of the gene product may be used. Such mammalian host cells include but are not limited to CHO, VERY, BHK, Hela, COS, MDCK, 293, 3T3, WI38, and in particular, breast cancer cell lines such as, for example, BT483, Hs578T, HTB2, BT20 and T47D, and normal mammary gland cell line such as, for example, CRL7030 and Hs578Bst.

[0198] For long-term, high-yield production of recombinant proteins, stable expression is preferred. For example, cell lines which stably express the antibody molecule may be engineered. Rather than using expression vectors which contain viral origins of replication, host cells can be transformed with DNA controlled by appropriate expression control elements (e.g., promoter, enhancer, sequences, transcription terminators, polyadenylation sites, etc.), and a selectable marker. Following the introduction of the foreign DNA, engineered cells may be allowed to grow for 1-2 days in an enriched media, and then are switched to a selective media. The selectable marker in the recombinant plasmid confers resistance to the selection and allows cells to stably integrate the plasmid into their chromosomes and grow to form foci which in turn can be cloned and expanded into cell lines. This method may advantageously be used to engineer cell lines which express the antibody molecule. Such engineered cell lines may be particularly useful in screening and evaluation of compounds that interact directly or indirectly with the antibody molecule.

[0199] A number of selection systems may be used, including but not limited to the herpes simplex virus thymidine kinase (Wigler et al., Cell 11:223 (1977)), hypoxanthine-guanine phosphoribosyltransferase (Szybalska & Szybalski, Proc. Natl. Acad. Sci. USA 48:202 (1992)), and adenine phosphoribosyltransferase (Lowy et al., Cell 22:817 (1980)) genes can be employed in tk-, hgprt- or aprt-cells, respectively. Also, antimetabolite resistance can be used as the basis of selection for the following genes: dhfr, which confers resistance to methotrexate (Wigler et al., Natl. Acad. Sci. USA 77:357 (1980); O'Hare et al., Proc. Natl. Acad. Sci. USA 78:1527 (1981)); gpt, which confers resistance to mycophenolic acid (Mulligan & Berg, Proc. Natl. Acad. Sci. USA 78:2072 (1981)); neo, which confers resistance to the aminoglycoside G-418 Clinical Pharmacy 12:488-505; Wu and Wu, Biotherapy 3:87-95 (1991); Tolstoshev, Ann. Rev. Pharmacol. Toxicol. 32:573-596 (1993); Mulligan, Science 260:926-932 (1993); and Morgan and Anderson, Ann. Rev. Biochem. 62:191-217 (1993); May, 1993, TIB TECH 11(5):155-215); and hygro, which confers resistance to hygromycin (Santerre et al., Gene 30:147 (1984)). Methods commonly known in the art of recombinant DNA technology may be routinely applied to select the desired recombinant clone, and such methods are described, for example, in Ausubel et al. (eds.), Current Protocols in Molecular Biology, John Wiley & Sons, NY (1993); Kriegler, Gene Transfer and Expression, A Laboratory Manual, Stockton Press, NY (1990); and in Chapters 12 and 13, Dracopoli et al. (eds), Current Protocols in Human Genetics, John Wiley & Sons, NY (1994); Colberre-Garapin et al., J. Mol. Biol. 150:1 (1981), which are incorporated by reference herein in their entireties.

[0200] The expression levels of an antibody molecule can be increased by vector amplification (for a review, see Bebbington and Hentschel, The use of vectors based on gene amplification for the expression of cloned genes in mammalian cells in DNA cloning, Vol.3. (Academic Press, New York, 1987)). When a marker in the vector system expressing antibody is amplifiable, increase in the level of inhibitor present in culture of host cell will increase the number of copies of the marker gene. Since the amplified region is associated with the antibody gene, production of the antibody will also increase (Crouse et al., Mol. Cell. Biol. 3:257 (1983)).

[0201] The host cell may be co-transfected with two expression vectors of the invention, the first vector encoding a heavy chain derived polypeptide and the second vector encoding a light chain derived polypeptide. The two vectors may contain identical selectable markers which enable equal expression of heavy and light chain polypeptides. Alternatively, a single vector may be used which encodes, and is capable of expressing, both heavy and light chain polypeptides. In such situations, the light chain should be placed before the heavy chain to avoid an excess of toxic free heavy chain (Proudfoot, Nature 322:52 (1986); Kohler, Proc. Natl. Acad. Sci. USA 77:2197 (1980)). The coding sequences for the heavy and light chains may comprise cDNA or genomic DNA.

[0202] Once an antibody molecule of the invention has been produced by an animal, chemically synthesized, or recombinantly expressed, it may be purified by any method known in the art for purification of an immunoglobulin molecule, for example, by chromatography (e.g., ion exchange, affinity, particularly by affinity for the specific antigen after Protein A, and sizing column chromatography), centrifugation, differential solubility, or by any other standard technique for the purification of proteins. In addition, the antibodies of the present invention or fragments thereof can be fused to heterologous polypeptide sequences described herein or otherwise known in the art, to facilitate purification.

[0203] The present invention encompasses antibodies recombinantly fused or chemically conjugated (including both covalently and non-covalently conjugations) to a polypeptide (or portion thereof, preferably at least 10, 20, 30, 40, 50, 60, 70, 80, 90 or 100 amino acids of the polypeptide) of the present invention to generate fusion proteins. The fusion does not necessarily need to be direct, but may occur through linker sequences. The antibodies may be specific for antigens other than polypeptides (or portion thereof, preferably at least 10, 20, 30, 40, 50, 60, 70, 80, 90 or 100 amino acids of the polypeptide) of the present invention. For example, antibodies may be used to target the polypeptides of the present invention to particular cell types, either in vitro or in vivo, by fusing or conjugating the polypeptides of the present invention to antibodies specific for particular cell surface receptors. Antibodies fused or conjugated to the polypeptides of the present invention may also be used in in vitro immunoassays and purification methods using methods known in the art. See e.g., Harbor et al., supra, and PCT publication WO 93/21232; EP 439,095; Naramura et al., Immunol. Lett. 39:91-99 (1994); U.S. Pat. No. 5,474,981; Gillies et al., PNAS 89:1428-1432 (1992); Fell et al., J. Immunol. 146:2446-2452(1991), which are incorporated by reference in their entireties.

[0204] The present invention further includes compositions comprising the polypeptides of the present invention fused or conjugated to antibody domains other than the variable regions. For example, the polypeptides of the present invention may be fused or conjugated to an antibody Fc region, or portion thereof. The antibody portion fused to a polypeptide of the present invention may comprise the constant region, hinge region, CH1 domain, CH2 domain, and CH3 domain or any combination of whole domains or portions thereof. The polypeptides may also be fused or conjugated to the above antibody portions to form multimers. For example, Fc portions fused to the polypeptides of the present invention can form dimers through disulfide bonding between the Fc portions. Higher multimeric forms can be made by fusing the polypeptides to portions of IgA and IgM. Methods for fusing or conjugating the polypeptides of the present invention to antibody portions are known in the art. See, e.g., U.S. Pat. Nos. 5,336,603; 5,622,929; 5,359,046; 5,349,053; 5,447,851; 5,112,946; EP 307,434; EP 367,166; PCT publications WO 96/04388; WO 91/06570; Ashkenazi et al., Proc. Natl. Acad. Sci. USA 88:10535-10539 (1991); Zheng et al., J. Immunol. 154:5590-5600 (1995); and Vil et al., Proc. Natl. Acad. Sci. USA 89:11337-11341(1992) (said references incorporated by reference in their entireties).

[0205] As discussed, supra, the polypeptides corresponding to a polypeptide, polypeptide fragment, or a variant of SEQ ID NO:Y may be fused or conjugated to the above antibody portions to increase the in vivo half life of the polypeptides or for use in immunoassays using methods known in the art. Further, the polypeptides corresponding to SEQ ID NO:Y may be fused or conjugated to the above antibody portions to facilitate purification. One reported example describes chimeric proteins consisting of the first two domains of the human CD4-polypeptide and various domains of the constant regions of the heavy or light chains of mammalian immunoglobulins. (EP 394,827; Traunecker et al., Nature 331:84-86 (1988). The polypeptides of the present invention fused or conjugated to an antibody having disulfide-linked dimeric structures (due to the IgG) may also be more efficient in binding and neutralizing other molecules, than the monomeric secreted protein or protein fragment alone. (Fountoulakis et al., J. Biochem. 270:3958-3964 (1995)). In many cases, the Fc part in a fusion protein is beneficial in therapy and diagnosis, and thus can result in, for example, improved pharmacokinetic properties. (EP A 232,262). Alternatively, deleting the Fc part after the fusion protein has been expressed, detected, and purified, would be desired. For example, the Fc portion may hinder therapy and diagnosis if the fusion protein is used as an antigen for immunizations. In drug discovery, for example, human proteins, such as hIL-5, have been fused with Fc portions for the purpose of high-throughput screening assays to identify antagonists of hIL-5. (See, Bennett et al., J. Molecular Recognition 8:52-58 (1995); Johanson et al., J. Biol. Chem. 270:9459-9471 (1995).

[0206] Moreover, the antibodies or fragments thereof of the present invention can be fused to marker sequences, such as a peptide to facilitate purification. In preferred embodiments, the marker amino acid sequence is a hexa-histidine peptide, such as the tag provided in a pQE vector (QIAGEN, Inc., 9259 Eton Avenue, Chatsworth, Calif., 91311), among others, many of which are commercially available. As described in Gentz et al., Proc. Natl. Acad. Sci. USA 86:821-824 (1989), for instance, hexa-histidine provides for convenient purification of the fusion protein. Other peptide tags useful for purification include, but are not limited to, the “HA” tag, which corresponds to an epitope derived from the influenza hemagglutinin protein (Wilson et al., Cell 37:767 (1984)) and the “flag” tag.

[0207] The present invention further encompasses antibodies or fragments thereof conjugated to a diagnostic or therapeutic agent. The antibodies can be used diagnostically to, for example, monitor the development or progression of a tumor as part of a clinical testing procedure to, e.g., determine the efficacy of a given treatment regimen. Detection can be facilitated by coupling the antibody to a detectable substance. Examples of detectable substances include various enzymes, prosthetic groups, fluorescent materials, luminescent materials, bioluminescent materials, radioactive materials, positron emitting metals using various positron emission tomographies, and nonradioactive paramagnetic metal ions. The detectable substance may be coupled or conjugated either directly to the antibody (or fragment thereof) or indirectly, through an intermediate (such as, for example, a linker known in the art) using techniques known in the art. See, for example, U.S. Pat. No. 4,741,900 for metal ions which can be conjugated to antibodies for use as diagnostics according to the present invention. Examples of suitable enzymes include horseradish peroxidase, alkaline phosphatase, beta-galactosidase, or acetylcholinesterase; examples of suitable prosthetic group complexes include streptavidin/biotin and avidin/biotin; examples of suitable fluorescent materials include umbelliferone, fluorescein, fluorescein isothiocyanate, rhodamine, dichlorotriazinylamine fluorescein, dansyl chloride or phycoerythrin; an example of a luminescent material includes luminol; examples of bioluminescent materials include luciferase, luciferin, and aequorin; and examples of suitable radioactive material include 125I, 131I, 111In or 99Tc.

[0208] Further, an antibody or fragment thereof may be conjugated to a therapeutic moiety such as a cytotoxin, e.g., a cytostatic or cytocidal agent, a therapeutic agent or a radioactive metal ion, e.g., alpha-emitters such as, for example, 213Bi. A cytotoxin or cytotoxic agent includes any agent that is detrimental to cells. Examples include paclitaxol, cytochalasin B, gramicidin D, ethidium bromide, emetine, mitomycin, etoposide, tenoposide, vincristine, vinblastine, colchicin, doxorubicin, daunorubicin, dihydroxy anthracin dione, mitoxantrone, mithramycin, actinomycin D, 1-dehydrotestosterone, glucocorticoids, procaine, tetracaine, lidocaine, propranolol, and puromycin and analogs or homologs thereof. Therapeutic agents include, but are not limited to, antimetabolites (e.g., methotrexate, 6-mercaptopurine, 6-thioguanine, cytarabine, 5-fluorouracil decarbazine), alkylating agents (e.g., mechlorethamine, thioepa chlorambucil, melphalan, carmustine (BSNU) and lomustine (CCNU), cyclothosphamide, busulfan, dibromomannitol, streptozotocin, mitomycin C, and cis-dichlorodiamine platinum (II) (DDP) cisplatin), anthracyclines (e.g., daunorubicin (formerly daunomycin) and doxorubicin), antibiotics (e.g., dactinomycin (formerly actinomycin), bleomycin, mithramycin, and anthramycin (AMC)), and anti-mitotic agents (e.g., vincristine and vinblastine).

[0209] The conjugates of the invention can be used for modifying a given biological response, the therapeutic agent or drug moiety is not to be construed as limited to classical chemical therapeutic agents. For example, the drug moiety may be a protein or polypeptide possessing a desired biological activity. Such proteins may include, for example, a toxin such as abrin, ricin A, pseudomonas exotoxin, or diphtheria toxin; a protein such as tumor necrosis factor, a-interferon, β-interferon, nerve growth factor, platelet derived growth factor, tissue plasminogen activator, an apoptotic agent, e.g., TNF-alpha, TNF-beta, AIM I (See, International Publication No. WO 97/33899), AIM II (See, International Publication No. WO 97/34911), Fas Ligand (Takahashi et al., Int. Immunol., 6:1567-1574 (1994)), VEGI (See, International Publication No. WO 99/23105), a thrombotic agent or an anti-angiogenic agent, e.g., angiostatin or endostatin; or, biological response modifiers such as, for example, lymphokines, interleukin-1 (“IL-1”), interleukin-2 (“IL-2”), interleukin-6 (“IL-6”), granulocyte macrophage colony stimulating factor (“GM-CSF”), granulocyte colony stimulating factor (“G-CSF”), or other growth factors.

[0210] Antibodies may also be attached to solid supports, which are particularly useful for immunoassays or purification of the target antigen. Such solid supports include, but are not limited to, glass, cellulose, polyacrylamide, nylon, polystyrene, polyvinyl chloride or polypropylene.

[0211] Techniques for conjugating such therapeutic moiety to antibodies are well known, see, e.g., Arnon et al., “Monoclonal Antibodies For Immunotargeting Of Drugs In Cancer Therapy”, in Monoclonal Antibodies And Cancer Therapy, Reisfeld et al. (eds.), pp. 243-56 (Alan R. Liss, Inc. 1985); Hellstrom et al., “Antibodies For Drug Delivery”, in Controlled Drug Delivery (2nd Ed.), Robinson et al. (eds.), pp. 623-53 (Marcel Dekker, Inc. 1987); Thorpe, “Antibody Carriers Of Cytotoxic Agents In Cancer Therapy: A Review”, in Monoclonal Antibodies '84: Biological And Clinical Applications, Pinchera et al. (eds.), pp. 475-506 (1985); “Analysis, Results, And Future Prospective Of The Therapeutic Use Of Radiolabeled Antibody In Cancer Therapy”, in Monoclonal Antibodies For Cancer Detection And Therapy, Baldwin et al. (eds.), pp. 303-16 (Academic Press 1985), and Thorpe et al., “The Preparation And Cytotoxic Properties Of Antibody-Toxin Conjugates”, Immunol. Rev. 62:119-58 (1982).

[0212] Alternatively, an antibody can be conjugated to a second antibody to form an antibody heteroconjugate as described by Segal in U.S. Pat. No. 4,676,980, which is incorporated herein by reference in its entirety.

[0213] An antibody, with or without a therapeutic moiety conjugated to it, administered alone or in combination with cytotoxic factor(s) and/or cytokine(s) can be used as a therapeutic.

[0214] Immunophenotyping

[0215] The antibodies of the invention may be utilized for immunophenotyping of cell lines and biological samples. The translation product of the gene of the present invention may be useful as a cell specific marker, or more specifically as a cellular marker that is differentially expressed at various stages of differentiation and/or maturation of particular cell types. Monoclonal antibodies directed against a specific epitope, or combination of epitopes, will allow for the screening of cellular populations expressing the marker. Various techniques can be utilized using monoclonal antibodies to screen for cellular populations expressing the marker(s), and include magnetic separation using antibody-coated magnetic beads, “panning” with antibody attached to a solid matrix (i.e., plate), and flow cytometry (See, e.g., U.S. Pat. No. 5,985,660; and Morrison et al., Cell, 96:737-49 (1999)).

[0216] These techniques allow for the screening of particular populations of cells, such as might be found with hematological malignancies (i.e. minimal residual disease (MRD) in acute leukemic patients) and “non-self” cells in transplantations to prevent Graft-versus-Host Disease (GVHD). Alternatively, these techniques allow for the screening of hematopoietic stem and progenitor cells capable of undergoing proliferation and/or differentiation, as might be found in human umbilical cord blood.

[0217] Assays for Antibody Binding

[0218] The antibodies of the invention may be assayed for immunospecific binding by any method known in the art. The immunoassays which can be used include but are not limited to competitive and non-competitive assay systems using techniques such as western blots, radioimmunoassays, ELISA (enzyme linked immunosorbent assay), “sandwich” immunoassays, immunoprecipitation assays, precipitin reactions, gel diffusion precipitin reactions, immunodiffusion assays, agglutination assays, complement-fixation assays, immunoradiometric assays, fluorescent immunoassays, protein A immunoassays, to name but a few. Such assays are routine and well known in the art (see, e.g., Ausubel et al, eds, 1994, Current Protocols in Molecular Biology, Vol. 1, John Wiley & Sons, Inc., New York, which is incorporated by reference herein in its entirety). Exemplary immunoassays are described briefly below (but are not intended by way of limitation).

[0219] Immunoprecipitation protocols generally comprise lysing a population of cells in a lysis buffer such as RIPA buffer (1% NP-40 or Triton X-100, 1% sodium deoxycholate, 0.1% SDS, 0.15 M NaCl, 0.01 M sodium phosphate at pH 7.2, 1% Trasylol) supplemented with protein phosphatase and/or protease inhibitors (e.g., EDTA, PMSF, aprotinin, sodium vanadate), adding the antibody of interest to the cell lysate, incubating for a period of time (e.g., 1-4 hours) at 4° C., adding protein A and/or protein G sepharose beads to the cell lysate, incubating for about an hour or more at 4° C., washing the beads in lysis buffer and resuspending the beads in SDS/sample buffer. The ability of the antibody of interest to immunoprecipitate a particular antigen can be assessed by, e.g., western blot analysis. One of skill in the art would be knowledgeable as to the parameters that can be modified to increase the binding of the antibody to an antigen and decrease the background (e.g., pre-clearing the cell lysate with sepharose beads). For further discussion regarding immunoprecipitation protocols see, e.g., Ausubel et al, eds, 1994, Current Protocols in Molecular Biology, Vol. 1, John Wiley & Sons, Inc., New York at 10.16.1.

[0220] Western blot analysis generally comprises preparing protein samples, electrophoresis of the protein samples in a polyacrylamide gel (e.g., 8%-20% SDS-PAGE depending on the molecular weight of the antigen), transferring the protein sample from the polyacrylamide gel to a membrane such as nitrocellulose, PVDF or nylon, blocking the membrane in blocking solution (e.g., PBS with 3% BSA or non-fat milk), washing the membrane in washing buffer (e.g., PBS-Tween 20), blocking the membrane with primary antibody (the antibody of interest) diluted in blocking buffer, washing the membrane in washing buffer, blocking the membrane with a secondary antibody (which recognizes the primary antibody, e.g., an anti-human antibody) conjugated to an enzymatic substrate (e.g., horseradish peroxidase or alkaline phosphatase) or radioactive molecule (e.g., 32P or 125I) diluted in blocking buffer, washing the membrane in wash buffer, and detecting the presence of the antigen. One of skill in the art would be knowledgeable as to the parameters that can be modified to increase the signal detected and to reduce the background noise. For further discussion regarding western blot protocols see, e.g., Ausubel et al, eds, 1994, Current Protocols in Molecular Biology, Vol. 1, John Wiley & Sons, Inc., New York at 10.8.1.

[0221] ELISAs comprise preparing antigen, coating the well of a 96 well microtiter plate with the antigen, adding the antibody of interest conjugated to a detectable compound such as an enzymatic substrate (e.g., horseradish peroxidase or alkaline phosphatase) to the well and incubating for a period of time, and detecting the presence of the antigen. In ELISAs the antibody of interest does not have to be conjugated to a detectable compound; instead, a second antibody (which recognizes the antibody of interest) conjugated to a detectable compound may be added to the well. Further, instead of coating the well with the antigen, the antibody may be coated to the well. In this case, a second antibody conjugated to a detectable compound may be added following the addition of the antigen of interest to the coated well. One of skill in the art would be knowledgeable as to the parameters that can be modified to increase the signal detected as well as other variations of ELISAs known in the art. For further discussion regarding ELISAs see, e.g., Ausubel et al, eds, 1994, Current Protocols in Molecular Biology, Vol. 1, John Wiley & Sons, Inc., New York at 11.2.1.

[0222] The binding affinity of an antibody to an antigen and the off-rate of an antibody-antigen interaction can be determined by competitive binding assays. One example of a competitive binding assay is a radioimmunoassay comprising the incubation of labeled antigen (e.g., 3H or 125I) with the antibody of interest in the presence of increasing amounts of unlabeled antigen, and the detection of the antibody bound to the labeled antigen. The affinity of the antibody of interest for a particular antigen and the binding off-rates can be determined from the data by scatchard plot analysis. Competition with a second antibody can also be determined using radioimmunoassays. In this case, the antigen is incubated with antibody of interest conjugated to a labeled compound (e.g., 3H or 125I) in the presence of increasing amounts of an unlabeled second antibody.

[0223] Therapeutic Uses

[0224] The present invention is further directed to antibody-based therapies which involve administering antibodies of the invention to an animal, preferably a mammal, and most preferably a human, patient for treating one or more of the disclosed diseases, disorders, or conditions. Therapeutic compounds of the invention include, but are not limited to, antibodies of the invention (including fragments, analogs and derivatives thereof as described herein) and nucleic acids encoding antibodies of the invention (including fragments, analogs and derivatives thereof and anti-idiotypic antibodies as described herein). The antibodies of the invention can be used to treat, inhibit or prevent diseases, disorders or conditions associated with aberrant expression and/or activity of a polypeptide of the invention, including, but not limited to, any one or more of the diseases, disorders, or conditions described herein. The treatment and/or prevention of diseases, disorders, or conditions associated with aberrant expression and/or activity of a polypeptide of the invention includes, but is not limited to, alleviating symptoms associated with those diseases, disorders or conditions. Antibodies of the invention may be provided in pharmaceutically acceptable compositions as known in the art or as described herein.

[0225] A summary of the ways in which the antibodies of the present invention may be used therapeutically includes binding polynucleotides or polypeptides of the present invention locally or systemically in the body or by direct cytotoxicity of the antibody, e.g. as mediated by complement (CDC) or by effector cells (ADCC). Some of these approaches are described in more detail below. Armed with the teachings provided herein, one of ordinary skill in the art will know how to use the antibodies of the present invention for diagnostic, monitoring or therapeutic purposes without undue experimentation.

[0226] The antibodies of this invention may be advantageously utilized in combination with other monoclonal or chimeric antibodies, or with lymphokines or hematopoietic growth factors (such as, e.g., IL-2, IL-3 and IL-7), for example, which serve to increase the number or activity of effector cells which interact with the antibodies.

[0227] The antibodies of the invention may be administered alone or in combination with other types of treatments (e.g., radiation therapy, chemotherapy, hormonal therapy, immunotherapy and anti-tumor agents). Generally, administration of products of a species origin or species reactivity (in the case of antibodies) that is the same species as that of the patient is preferred. Thus, in a preferred embodiment, human antibodies, fragments derivatives, analogs, or nucleic acids, are administered to a human patient for therapy or prophylaxis.

[0228] It is preferred to use high affinity and/or potent in vivo inhibiting and/or neutralizing antibodies against polypeptides or polynucleotides of the present invention, fragments or regions thereof, for both immunoassays directed to and therapy of disorders related to polynucleotides or polypeptides, including fragments thereof, of the present invention. Such antibodies, fragments, or regions, will preferably have an affinity for polynucleotides or polypeptides of the invention, including fragments thereof. Preferred binding affinities include those with a dissociation constant or Kd less than 5×10⁻² M, 10^{-2 M,} 5×10⁻³ M, 10⁻³ M, 5×10⁻⁴ M, 10⁻⁴ M, 5×10⁵ M, 10⁵ M, 5×10⁻⁶ M, 10⁻⁶ M, 5×10⁻⁷ M, 10⁻⁷ M, 5×10⁻⁸ M, 10⁻⁸ M, 5×10⁻⁹ M, 10⁻⁹ M, 5×10⁻¹⁰ M, 10⁻¹⁰ M, 5×10⁻¹¹ M, 10⁻¹¹ M, 5×10⁻¹² M, 10⁻¹² M, 5×10⁻¹³ M, 10⁻¹³ M, 5×10⁻¹⁴ M, 10⁻¹⁴ M, 5×10⁻¹⁵ M, and 10⁻¹⁵ M.

[0229] Gene Therapy

[0230] In a specific embodiment, nucleic acids comprising sequences encoding antibodies or functional derivatives thereof, are administered to treat, inhibit or prevent a disease or disorder associated with aberrant expression and/or activity of a polypeptide of the invention, by way of gene therapy. Gene therapy refers to therapy performed by the administration to a subject of an expressed or expressible nucleic acid. In this embodiment of the invention, the nucleic acids produce their encoded protein that mediates a therapeutic effect.

[0231] Any of the methods for gene therapy available in the art can be used according to the present invention. Exemplary methods are described below.

[0232] For general reviews of the methods of gene therapy, see Goldspiel et al., Clinical Pharmacy 12:488-505 (1993); Wu and Wu, Biotherapy 3:87-95 (1991); Tolstoshev, Ann. Rev. Pharmacol. Toxicol. 32:573-596 (1993); Mulligan, Science 260:926-932 (1993); and Morgan and Anderson, Ann. Rev. Biochem. 62:191-217 (1993); May, TIBTECH 11(5):155-215 (1993). Methods commonly known in the art of recombinant DNA technology which can be used are described in Ausubel et al. (eds.), Current Protocols in Molecular Biology, John Wiley & Sons, NY (1993); and Kriegler, Gene Transfer and Expression, A Laboratory Manual, Stockton Press, NY (1990).

[0233] In a preferred aspect, the compound comprises nucleic acid sequences encoding an antibody, said nucleic acid sequences being part of expression vectors that express the antibody or fragments or chimeric proteins or heavy or light chains thereof in a suitable host. In particular, such nucleic acid sequences have promoters operably linked to the antibody coding region, said promoter being inducible or constitutive, and, optionally, tissue-specific. In another particular embodiment, nucleic acid molecules are used in which the antibody coding sequences and any other desired sequences are flanked by regions that promote homologous recombination at a desired site in the genome, thus providing for intrachromosomal expression of the antibody encoding nucleic acids (Koller and Smithies, Proc. Natl. Acad. Sci. USA 86:8932-8935 (1989); Zijlstra et al., Nature 342:435-438 (1989). In specific embodiments, the expressed antibody molecule is a single chain antibody; alternatively, the nucleic acid sequences include sequences encoding both the heavy and light chains, or fragments thereof, of the antibody.

[0234] Delivery of the nucleic acids into a patient may be either direct, in which case the patient is directly exposed to the nucleic acid or nucleic acid-carrying vectors, or indirect, in which case, cells are first transformed with the nucleic acids in vitro, then transplanted into the patient. These two approaches are known, respectively, as in vivo or ex vivo gene therapy.

[0235] In a specific embodiment, the nucleic acid sequences are directly administered in vivo, where it is expressed to produce the encoded product. This can be accomplished by any of numerous methods known in the art, e.g., by constructing them as part of an appropriate nucleic acid expression vector and administering it so that they become intracellular, e.g., by infection using defective or attenuated retrovirals or other viral vectors (see U.S. Pat. No. 4,980,286), or by direct injection of naked DNA, or by use of microparticle bombardment (e.g., a gene gun; Biolistic, Dupont), or coating with lipids or cell-surface receptors or transfecting agents, encapsulation in liposomes, microparticles, or microcapsules, or by administering them in linkage to a peptide which is known to enter the nucleus, by administering it in linkage to a ligand subject to receptor-mediated endocytosis (see, e.g., Wu and Wu, J. Biol. Chem. 262:4429-4432 (1987)) (which can be used to target cell types specifically expressing the receptors), etc. In another embodiment, nucleic acid-ligand complexes can be formed in which the ligand comprises a fusogenic viral peptide to disrupt endosomes, allowing the nucleic acid to avoid lysosomal degradation. In yet another embodiment, the nucleic acid can be targeted in vivo for cell specific uptake and expression, by targeting a specific receptor (see, e.g., PCT Publications WO 92/06180; WO 92/22635; WO92/20316; WO93/14188, WO 93/20221). Alternatively, the nucleic acid can be introduced intracellularly and incorporated within host cell DNA for expression, by homologous recombination (Koller and Smithies, Proc. Natl. Acad. Sci. USA 86:8932-8935 (1989); Zijlstra et al., Nature 342:435-438 (1989)).

[0236] In a specific embodiment, viral vectors that contains nucleic acid sequences encoding an antibody of the invention are used. For example, a retroviral vector can be used (see Miller et al., Meth. Enzymol. 217:581-599 (1993)). These retroviral vectors contain the components necessary for the correct packaging of the viral genome and integration into the host cell DNA. The nucleic acid sequences encoding the antibody to be used in gene therapy are cloned into one or more vectors, which facilitates delivery of the gene into a patient. More detail about retroviral vectors can be found in Boesen et al., Biotherapy 6:291-302 (1994), which describes the use of a retroviral vector to deliver the mdr1 gene to hematopoietic stem cells in order to make the stem cells more resistant to chemotherapy. Other references illustrating the use of retroviral vectors in gene therapy are: Clowes et al., J. Clin. Invest. 93:644-651 (1994); Kiem et al., Blood 83:1467-1473 (1994); Salmons and Gunzberg, Human Gene Therapy 4:129-141 (1993); and Grossman and Wilson, Curr. Opin. in Genetics and Devel. 3:110-114 (1993).

[0237] Adenoviruses are other viral vectors that can be used in gene therapy. Adenoviruses are especially attractive vehicles for delivering genes to respiratory epithelia. Adenoviruses naturally infect respiratory epithelia where they cause a mild disease. Other targets for adenovirus-based delivery systems are liver, the central nervous system, endothelial cells, and muscle. Adenoviruses have the advantage of being capable of infecting non-dividing cells. Kozarsky and Wilson, Current Opinion in Genetics and Development 3:499-503 (1993) present a review of adenovirus-based gene therapy. Bout et al., Human Gene Therapy 5:3-10 (1994) demonstrated the use of adenovirus vectors to transfer genes to the respiratory epithelia of rhesus monkeys. Other instances of the use of adenoviruses in gene therapy can be found in Rosenfeld et al., Science 252:431-434 (1991); Rosenfeld et al., Cell 68:143-155 (1992); Mastrangeli et al., J. Clin. Invest. 91:225-234 (1993); PCT Publication WO94/12649; and Wang, et al., Gene Therapy 2:775-783 (1995). In a preferred embodiment, adenovirus vectors are used.

[0238] Adeno-associated virus (AAV) has also been proposed for use in gene therapy (Walsh et al., Proc. Soc. Exp. Biol. Med. 204:289-300 (1993); U.S. Pat. No. 5,436,146).

[0239] Another approach to gene therapy involves transferring a gene to cells in tissue culture by such methods as electroporation, lipofection, calcium phosphate mediated transfection, or viral infection. Usually, the method of transfer includes the transfer of a selectable marker to the cells. The cells are then placed under selection to isolate those cells that have taken up and are expressing the transferred gene. Those cells are then delivered to a patient.

[0240] In this embodiment, the nucleic acid is introduced into a cell prior to administration in vivo of the resulting recombinant cell. Such introduction can be carried out by any method known in the art, including but not limited to transfection, electroporation, microinjection, infection with a viral or bacteriophage vector containing the nucleic acid sequences, cell fusion, chromosome-mediated gene transfer, microcell-mediated gene transfer, spheroplast fusion, etc. Numerous techniques are known in the art for the introduction of foreign genes into cells (see, e.g., Loeffler and Behr, Meth. Enzymol. 217:599-618 (1993); Cohen et al., Meth. Enzymol. 217:618-644 (1993); Cline, Pharmac. Ther. 29:69-92m (1985) and may be used in accordance with the present invention, provided that the necessary developmental and physiological functions of the recipient cells are not disrupted. The technique should provide for the stable transfer of the nucleic acid to the cell, so that the nucleic acid is expressible by the cell and preferably heritable and expressible by its cell progeny.

[0241] The resulting recombinant cells can be delivered to a patient by various methods known in the art. Recombinant blood cells (e.g., hematopoietic stem or progenitor cells) are preferably administered intravenously. The amount of cells envisioned for use depends on the desired effect, patient state, etc., and can be determined by one skilled in the art.

[0242] Cells into which a nucleic acid can be introduced for purposes of gene therapy encompass any desired, available cell type, and include but are not limited to epithelial cells, endothelial cells, keratinocytes, fibroblasts, muscle cells, hepatocytes; blood cells such as Tlymphocytes, Blymphocytes, monocytes, macrophages, neutrophils, eosinophils, megakaryocytes, granulocytes; various stem or progenitor cells, in particular hematopoietic stem or progenitor cells, e.g., as obtained from bone marrow, umbilical cord blood, peripheral blood, fetal liver, etc.

[0243] In a preferred embodiment, the cell used for gene therapy is autologous to the patient.

[0244] In an embodiment in which recombinant cells are used in gene therapy, nucleic acid sequences encoding an antibody are introduced into the cells such that they are expressible by the cells or their progeny, and the recombinant cells are then administered in vivo for therapeutic effect. In a specific embodiment, stem or progenitor cells are used. Any stem and/or progenitor cells which can be isolated and maintained in vitro can potentially be used in accordance with this embodiment of the present invention (see e.g. PCT Publication WO 94/08598; Stemple and Anderson, Cell 71:973-985 (1992); Rheinwald, Meth. Cell Bio. 21A:229 (1980); and Pittelkow and Scott, Mayo Clinic Proc. 61:771 (1986)).

[0245] In a specific embodiment, the nucleic acid to be introduced for purposes of gene therapy comprises an inducible promoter operably linked to the coding region, such that expression of the nucleic acid is controllable by controlling the presence or absence of the appropriate inducer of transcription. Demonstration of Therapeutic or Prophylactic Activity.

[0246] The compounds or pharmaceutical compositions of the invention are preferably tested in vitro, and then in vivo for the desired therapeutic or prophylactic activity, prior to use in humans. For example, in vitro assays to demonstrate the therapeutic or prophylactic utility of a compound or pharmaceutical composition include, the effect of a compound on a cell line or a patient tissue sample. The effect of the compound or composition on the cell line and/or tissue sample can be determined utilizing techniques known to those of skill in the art including, but not limited to, rosette formation assays and cell lysis assays. In accordance with the invention, in vitro assays which can be used to determine whether administration of a specific compound is indicated, include in vitro cell culture assays in which a patient tissue sample is grown in culture, and exposed to or otherwise administered a compound, and the effect of such compound upon the tissue sample is observed.

[0247] Therapeutic/Prophylactic Administration and Composition

[0248] The invention provides methods of treatment, inhibition and prophylaxis by administration to a subject of an effective amount of a compound or pharmaceutical composition of the invention, preferably a polypeptide or antibody of the invention. In a preferred aspect, the compound is substantially purified (e.g., substantially free from substances that limit its effect or produce undesired side-effects). The subject is preferably an animal, including but not limited to animals such as cows, pigs, horses, chickens, cats, dogs, etc., and is preferably a mammal, and most preferably human.

[0249] Formulations and methods of administration that can be employed when the compound comprises a nucleic acid or an immunoglobulin are described above; additional appropriate formulations and routes of administration can be selected from among those described herein below.

[0250] Various delivery systems are known and can be used to administer a compound of the invention, e.g., encapsulation in liposomes, microparticles, microcapsules, recombinant cells capable of expressing the compound, receptor-mediated endocytosis (see, e.g., Wu and Wu, J. Biol. Chem. 262:4429-4432 (1987)), construction of a nucleic acid as part of a retroviral or other vector, etc. Methods of introduction include but are not limited to intradermal, intramuscular, intraperitoneal, intravenous, subcutaneous, intranasal, epidural, and oral routes. The compounds or compositions may be administered by any convenient route, for example by infusion or bolus injection, by absorption through epithelial or mucocutaneous linings (e.g., oral mucosa, rectal and intestinal mucosa, etc.) and may be administered together with other biologically active agents. Administration can be systemic or local. In addition, it may be desirable to introduce the pharmaceutical compounds or compositions of the invention into the central nervous system by any suitable route, including intraventricular and intrathecal injection; intraventricular injection may be facilitated by an intraventricular catheter, for example, attached to a reservoir, such as an Ommaya reservoir. Pulmonary administration can also be employed, e.g., by use of an inhaler or nebulizer, and formulation with an aerosolizing agent.

[0251] In a specific embodiment, it may be desirable to administer the pharmaceutical compounds or compositions of the invention locally to the area in need of treatment; this may be achieved by, for example, and not by way of limitation, local infusion during surgery, topical application, e.g., in conjunction with a wound dressing after surgery, by injection, by means of a catheter, by means of a suppository, or by means of an implant, said implant being of a porous, non-porous, or gelatinous material, including membranes, such as sialastic membranes, or fibers. Preferably, when administering a protein, including an antibody, of the invention, care must be taken to use materials to which the protein does not absorb.

[0252] In another embodiment, the compound or composition can be delivered in a vesicle, in particular a liposome (see Langer, Science 249:1527-1533 (1990); Treat et al., in Liposomes in the Therapy of Infectious Disease and Cancer, Lopez-Berestein and Fidler (eds.), Liss, N.Y., pp. 353-365 (1989); Lopez-Berestein, ibid., pp. 317-327; see generally ibid.)

[0253] In yet another embodiment, the compound or composition can be delivered in a controlled release system. In one embodiment, a pump may be used (see Langer, supra; Sefton, CRC Crit. Ref. Biomed. Eng. 14:201 (1987); Buchwald et al., Surgery 88:507 (1980); Saudek et al., N. Engl. J. Med. 321:574 (1989)). In another embodiment, polymeric materials can be used (see Medical Applications of Controlled Release, Langer and Wise (eds.), CRC Pres., Boca Raton, Fla. (1974); Controlled Drug Bioavailability, Drug Product Design and Performance, Smolen and Ball (eds.), Wiley, N.Y. (1984); Ranger and Peppas, J., Macromol. Sci. Rev. Macromol. Chem. 23:61 (1983); see also Levy et al., Science 228:190 (1985); During et al., Ann. Neurol. 25:351 (1989); Howard et al., J.Neurosurg. 71:105 (1989)). In yet another embodiment, a controlled release system can be placed in proximity of the therapeutic target, i.e., the brain, thus requiring only a fraction of the systemic dose (see, e.g., Goodson, in Medical Applications of Controlled Release, supra, vol. 2, pp. 115-138 (1984)).

[0254] Other controlled release systems are discussed in the review by Langer (Science 249:1527-1533 (1990)).

[0255] In a specific embodiment where the compound of the invention is a nucleic acid encoding a protein, the nucleic acid can be administered in vivo to promote expression of its encoded protein, by constructing it as part of an appropriate nucleic acid expression vector and administering it so that it becomes intracellular, e.g., by use of a retroviral vector (see U.S. Pat. No. 4,980,286), or by direct injection, or by use of microparticle bombardment (e.g., a gene gun; Biolistic, Dupont), or coating with lipids or cell-surface receptors or transfecting agents, or by administering it in linkage to a homeobox-like peptide which is known to enter the nucleus (see e.g., Joliot et al., Proc. Natl. Acad. Sci. USA 88:1864-1868 (1991)), etc. Alternatively, a nucleic acid can be introduced intracellularly and incorporated within host cell DNA for expression, by homologous recombination.

[0256] The present invention also provides pharmaceutical compositions. Such compositions comprise a therapeutically effective amount of a compound, and a pharmaceutically acceptable carrier. In a specific embodiment, the term “pharmaceutically acceptable” means approved by a regulatory agency of the Federal or a state government or listed in the U.S. Pharmacopeia or other generally recognized pharmacopeia for use in animals, and more particularly in humans. The term “carrier” refers to a diluent, adjuvant, excipient, or vehicle with which the therapeutic is administered. Such pharmaceutical carriers can be sterile liquids, such as water and oils, including those of petroleum, animal, vegetable or synthetic origin, such as peanut oil, soybean oil, mineral oil, sesame oil and the like. Water is a preferred carrier when the pharmaceutical composition is administered intravenously. Saline solutions and aqueous dextrose and glycerol solutions can also be employed as liquid carriers, particularly for injectable solutions. Suitable pharmaceutical excipients include starch, glucose, lactose, sucrose, gelatin, malt, rice, flour, chalk, silica gel, sodium stearate, glycerol monostearate, talc, sodium chloride, dried skim milk, glycerol, propylene, glycol, water, ethanol and the like. The composition, if desired, can also contain minor amounts of wetting or emulsifying agents, or pH buffering agents. These compositions can take the form of solutions, suspensions, emulsion, tablets, pills, capsules, powders, sustained-release formulations and the like. The composition can be formulated as a suppository, with traditional binders and carriers such as triglycerides. Oral formulation can include standard carriers such as pharmaceutical grades of mannitol, lactose, starch, magnesium stearate, sodium saccharine, cellulose, magnesium carbonate, etc. Examples of suitable pharmaceutical carriers are described in “Remington's Pharmaceutical Sciences” by E. W. Martin. Such compositions will contain a therapeutically effective amount of the compound, preferably in purified form, together with a suitable amount of carrier so as to provide the form for proper administration to the patient. The formulation should suit the mode of administration.

[0257] In a preferred embodiment, the composition is formulated in accordance with routine procedures as a pharmaceutical composition adapted for intravenous administration to human beings. Typically, compositions for intravenous administration are solutions in sterile isotonic aqueous buffer. Where necessary, the composition may also include a solubilizing agent and a local anesthetic such as lignocaine to ease pain at the site of the injection. Generally, the ingredients are supplied either separately or mixed together in unit dosage form, for example, as a dry lyophilized powder or water free concentrate in a hermetically sealed container such as an ampoule or sachette indicating the quantity of active agent. Where the composition is to be administered by infusion, it can be dispensed with an infusion bottle containing sterile pharmaceutical grade water or saline. Where the composition is administered by injection, an ampoule of sterile water for injection or saline can be provided so that the ingredients may be mixed prior to administration.

[0258] The compounds of the invention can be formulated as neutral or salt forms. Pharmaceutically acceptable salts include those formed with anions such as those derived from hydrochloric, phosphoric, acetic, oxalic, tartaric acids, etc., and those formed with cations such as those derived from sodium, potassium, ammonium, calcium, ferric hydroxides, isopropylamine, triethylamine, 2-ethylamino ethanol, histidine, procaine, etc.

[0259] The amount of the compound of the invention which will be effective in the treatment, inhibition and prevention of a disease or disorder associated with aberrant expression and/or activity of a polypeptide of the invention can be determined by standard clinical techniques. In addition, in vitro assays may optionally be employed to help identify optimal dosage ranges. The precise dose to be employed in the formulation will also depend on the route of administration, and the seriousness of the disease or disorder, and should be decided according to the judgment of the practitioner and each patient's circumstances. Effective doses may be extrapolated from dose-response curves derived from in vitro or animal model test systems.

[0260] For antibodies, the dosage administered to a patient is typically 0.1 mg/kg to 100 mg/kg of the patient's body weight. Preferably, the dosage administered to a patient is between 0.1 mg/kg and 20 mg/kg of the patient's body weight, more preferably 1 mg/kg to 10 mg/kg of the patient's body weight. Generally, human antibodies have a longer half-life within the human body than antibodies from other species due to the immune response to the foreign polypeptides. Thus, lower dosages of human antibodies and less frequent administration is often possible. Further, the dosage and frequency of administration of antibodies of the invention may be reduced by enhancing uptake and tissue penetration (e.g., into the brain) of the antibodies by modifications such as, for example, lipidation.

[0261] The invention also provides a pharmaceutical pack or kit comprising one or more containers filled with one or more of the ingredients of the pharmaceutical compositions of the invention. Optionally associated with such container(s) can be a notice in the form prescribed by a governmental agency regulating the manufacture, use or sale of pharmaceuticals or biological products, which notice reflects approval by the agency of manufacture, use or sale for human administration.

[0262] Diagnosis and Imaging

[0263] Labeled antibodies, and derivatives and analogs thereof, which specifically bind to a polypeptide of interest can be used for diagnostic purposes to detect, diagnose, or monitor diseases, disorders, and/or conditions associated with the aberrant expression and/or activity of a polypeptide of the invention. The invention provides for the detection of aberrant expression of a polypeptide of interest, comprising (a) assaying the expression of the polypeptide of interest in cells or body fluid of an individual using one or more antibodies specific to the polypeptide interest and (b) comparing the level of gene expression with a standard gene expression level, whereby an increase or decrease in the assayed polypeptide gene expression level compared to the standard expression level is indicative of aberrant expression.

[0264] The invention provides a diagnostic assay for diagnosing a disorder, comprising (a) assaying the expression of the polypeptide of interest in cells or body fluid of an individual using one or more antibodies specific to the polypeptide interest and (b) comparing the level of gene expression with a standard gene expression level, whereby an increase or decrease in the assayed polypeptide gene expression level compared to the standard expression level is indicative of a particular disorder. With respect to cancer, the presence of a relatively high amount of transcript in biopsied tissue from an individual may indicate a predisposition for the development of the disease, or may provide a means for detecting the disease prior to the appearance of actual clinical symptoms. A more definitive diagnosis of this type may allow health professionals to employ preventative measures or aggressive treatment earlier thereby preventing the development or further progression of the cancer.

[0265] Antibodies of the invention can be used to assay protein levels in a biological sample using classical immunohistological methods known to those of skill in the art (e.g., see Jalkanen, et al., J. Cell. Biol. 101:976-985 (1985); Jalkanen, et al., J. Cell. Biol. 105:3087-3096 (1987)). Other antibody-based methods useful for detecting protein gene expression include immunoassays, such as the enzyme linked immunosorbent assay (ELISA) and the radioimmunoassay (RIA). Suitable antibody assay labels are known in the art and include enzyme labels, such as, glucose oxidase; radioisotopes, such as iodine (125I, 121I), carbon (14C), sulfur (35S), tritium (3H), indium (112In), and technetium (99Tc); luminescent labels, such as luminol; and fluorescent labels, such as fluorescein and rhodamine, and biotin.

[0266] One aspect of the invention is the detection and diagnosis of a disease or disorder associated with aberrant expression of a polypeptide of interest in an animal, preferably a mammal and most preferably a human. In one embodiment, diagnosis comprises: a) administering (for example, parenterally, subcutaneously, or intraperitoneally) to a subject an effective amount of a labeled molecule which specifically binds to the polypeptide of interest; b) waiting for a time interval following the administering for permitting the labeled molecule to preferentially concentrate at sites in the subject where the polypeptide is expressed (and for unbound labeled molecule to be cleared to background level); c) determining background level; and d) detecting the labeled molecule in the subject, such that detection of labeled molecule above the background level indicates that the subject has a particular disease or disorder associated with aberrant expression of the polypeptide of interest. Background level can be determined by various methods including, comparing the amount of labeled molecule detected to a standard value previously determined for a particular system.

[0267] It will be understood in the art that the size of the subject and the imaging system used will determine the quantity of imaging moiety needed to produce diagnostic images. In the case of a radioisotope moiety, for a human subject, the quantity of radioactivity injected will normally range from about 5 to 20 millicuries of 99mTc. The labeled antibody or antibody fragment will then preferentially accumulate at the location of cells which contain the specific protein. In vivo tumor imaging is described in S. W. Burchiel et al., “Immunopharmacokinetics of Radiolabeled Antibodies and Their Fragments.” (Chapter 13 in Tumor Imaging: The Radiochemical Detection of Cancer, S. W. Burchiel and B. A. Rhodes, eds., Masson Publishing Inc. (1982).

[0268] Depending on several variables, including the type of label used and the mode of administration, the time interval following the administration for permitting the labeled molecule to preferentially concentrate at sites in the subject and for unbound labeled molecule to be cleared to background level is 6 to 48 hours or 6 to 24 hours or 6 to 12 hours. In another embodiment the time interval following administration is 5 to 20 days or 5 to 10 days.

[0269] In an embodiment, monitoring of the disease or disorder is carried out by repeating the method for diagnosing the disease or disease, for example, one month after initial diagnosis, six months after initial diagnosis, one year after initial diagnosis, etc.

[0270] Presence of the labeled molecule can be detected in the patient using methods known in the art for in vivo scanning. These methods depend upon the type of label used. Skilled artisans will be able to determine the appropriate method for detecting a particular label. Methods and devices that may be used in the diagnostic methods of the invention include, but are not limited to, computed tomography (CT), whole body scan such as position emission tomography (PET), magnetic resonance imaging (MRI), and sonography.

[0271] In a specific embodiment, the molecule is labeled with a radioisotope and is detected in the patient using a radiation responsive surgical instrument (Thurston et al., U.S. Pat. No. 5,441,050). In another embodiment, the molecule is labeled with a fluorescent compound and is detected in the patient using a fluorescence responsive scanning instrument. In another embodiment, the molecule is labeled with a positron emitting metal and is detected in the patent using positron emission-tomography. In yet another embodiment, the molecule is labeled with a paramagnetic label and is detected in a patient using magnetic resonance imaging (MRI).

[0272] Kits

[0273] The present invention provides kits that can be used in the above methods. In one embodiment, a kit comprises an antibody of the invention, preferably a purified antibody, in one or more containers. In a specific embodiment, the kits of the present invention contain a substantially isolated polypeptide comprising an epitope which is specifically immunoreactive with an antibody included in the kit. Preferably, the kits of the present invention further comprise a control antibody which does not react with the polypeptide of interest. In another specific embodiment, the kits of the present invention contain a means for detecting the binding of an antibody to a polypeptide of interest (e.g., the antibody may be conjugated to a detectable substrate such as a fluorescent compound, an enzymatic substrate, a radioactive compound or a luminescent compound, or a second antibody which recognizes the first antibody may be conjugated to a detectable substrate).

[0274] In another specific embodiment of the present invention, the kit is a diagnostic kit for use in screening serum containing antibodies specific against proliferative and/or cancerous polynucleotides and polypeptides. Such a kit may include a control antibody that does not react with the polypeptide of interest. Such a kit may include a substantially isolated polypeptide antigen comprising an epitope which is specifically immunoreactive with at least one anti-polypeptide antigen antibody. Further, such a kit includes means for detecting the binding of said antibody to the antigen (e.g., the antibody may be conjugated to a fluorescent compound such as fluorescein or rhodamine which can be detected by flow cytometry). In specific embodiments, the kit may include a recombinantly produced or chemically synthesized polypeptide antigen. The polypeptide antigen of the kit may also be attached to a solid support.

[0275] In a more specific embodiment the detecting means of the above-described kit includes a solid support to which said polypeptide antigen is attached. Such a kit may also include a non-attached reporter-labeled anti-human antibody. In this embodiment, binding of the antibody to the polypeptide antigen can be detected by binding of the said reporter-labeled antibody.

[0276] In an additional embodiment, the invention includes a diagnostic kit for use in screening serum containing antigens of the polypeptide of the invention. The diagnostic kit includes a substantially isolated antibody specifically immunoreactive with polypeptide or polynucleotide antigens, and means for detecting the binding of the polynucleotide or polypeptide antigen to the antibody. In one embodiment, the antibody is attached to a solid support. In a specific embodiment, the antibody may be a monoclonal antibody. The detecting means of the kit may include a second, labeled monoclonal antibody. Alternatively, or in addition, the detecting means may include a labeled, competing antigen.

[0277] In one diagnostic configuration, test serum is reacted with a solid phase reagent having a surface-bound antigen obtained by the methods of the present invention. After binding with specific antigen antibody to the reagent and removing unbound serum components by washing, the reagent is reacted with reporter-labeled anti-human antibody to bind reporter to the reagent in proportion to the amount of bound anti-antigen antibody on the solid support. The reagent is again washed to remove unbound labeled antibody, and the amount of reporter associated with the reagent is determined. Typically, the reporter is an enzyme which is detected by incubating the solid phase in the presence of a suitable fluorometric, luminescent or colorimetric substrate (Sigma, St. Louis, Mo.).

[0278] The solid surface reagent in the above assay is prepared by known techniques for attaching protein material to solid support material, such as polymeric beads, dip sticks, 96-well plate or filter material. These attachment methods generally include non-specific adsorption of the protein to the support or covalent attachment of the protein, typically through a free amine group, to a chemically reactive group on the solid support, such as an activated carboxyl, hydroxyl, or aldehyde group. Alternatively, streptavidin coated plates can be used in conjunction with biotinylated antigen(s).

[0279] Thus, the invention provides an assay system or kit for carrying out this diagnostic method. The kit generally includes a support with surface-bound recombinant antigens, and a reporter-labeled anti-human antibody for detecting surface-bound anti-antigen antibody.

[0280] Uses of the Polynucleotides

[0281] Each of the polynucleotides identified herein can be used in numerous ways as reagents. The following description should be considered exemplary and utilizes known techniques.

[0282] The prostate cancer antigen polynucleotides of the present invention are useful for chromosome identification. There exists an ongoing need to identify new chromosome markers, since few chromosome marking reagents, based on actual sequence data (repeat polymorphisms), are presently available. Each sequence is specifically targeted to and can hybridize with a particular location on an individual human chromosome, thus each polynucleotide of the present invention can routinely be used as a chromosome marker using techniques known in the art.

[0283] Briefly, sequences can be mapped to chromosomes by preparing PCR primers (preferably at least 15 bp (e.g., 15-25 bp) from the sequences shown in SEQ ID NO:X, or the complement thereto. Primers can optionally be selected using computer analysis so that primers do not span more than one predicted exon in the genomic DNA. These primers are then used for PCR screening of somatic cell hybrids containing individual human chromosomes. Only those hybrids containing the human gene corresponding to SEQ ID NO:X will yield an amplified fragment.

[0284] Similarly, somatic hybrids provide a rapid method of PCR mapping the polynucleotides to particular chromosomes. Three or more clones can be assigned per day using a single thermal cycler. Moreover, sublocalization of the polynucleotides can be achieved with panels of specific chromosome fragments. Other gene mapping strategies that can be used include in situ hybridization, prescreening with labeled flow-sorted chromosomes, preselection by hybridization to construct chromosome specific-cDNA libraries, and computer mapping techniques (See, e.g., Shuler, Trends Biotechnol 16:456-459 (1998) which is hereby incorporated by reference in its entirety).

[0285] Precise chromosomal location of the polynucleotides can also be achieved using fluorescence in situ hybridization (FISH) of a metaphase chromosomal spread. This technique uses polynucleotides as short as 500 or 600 bases; however, polynucleotides 2,000-4,000 bp are preferred. For a review of this technique, see Verma et al., “Human Chromosomes: a Manual of Basic Techniques,” Pergamon Press, New York (1988).

[0286] For chromosome mapping, the polynucleotides can be used individually (to mark a single chromosome or a single site on that chromosome) or in panels (for marking multiple sites and/or multiple chromosomes).

[0287] Thus, the present invention also provides a method for chromosomal localization which involves (a) preparing PCR primers from the polynucleotide sequences in Table 3 and SEQ ID NO:X and (b) screening somatic cell hybrids containing individual chromosomes.

[0288] The polynucleotides of the present invention would likewise be useful for radiation hybrid mapping, HAPPY mapping, and long range restriction mapping. For a review of these techniques and others known in the art, see, e.g. Dear, “Genome Mapping: A Practical Approach,” IRL Press at Oxford University Press, London (1997); Aydin, J. Mol. Med. 77:691-694 (1999); Hacia et al., Mol. Psychiatry 3:483-492 (1998); Herrick et al., Chromosome Res. 7:409-423 (1999); Hamilton et al., Methods Cell Biol. 62:265-280 (2000); and/or Ott, J. Hered. 90:68-70 (1999) each of which is hereby incorporated by reference in its entirety.

[0289] Once a polynucleotide has been mapped to a precise chromosomal location, the physical position of the polynucleotide can be used in linkage analysis. Linkage analysis establishes coinheritance between a chromosomal location and presentation of a particular disease. (Disease mapping data are found, for example, in V. McKusick, Mendelian Inheritance in Man (available on line through Johns Hopkins University Welch Medical Library).) Assuming 1 megabase mapping resolution and one gene per 20 kb, a cDNA precisely localized to a chromosomal region associated with the disease could be one of 50-500 potential causative genes.

[0290] Thus, once coinheritance is established, differences in a polynucleotide of the invention and the corresponding gene between affected and unaffected individuals can be examined. First, visible structural alterations in the chromosomes, such as deletions or translocations, are examined in chromosome spreads or by PCR. If no structural alterations exist, the presence of point mutations are ascertained. Mutations observed in some or all affected individuals, but not in normal individuals, indicates that the mutation may cause the disease. However, complete sequencing of the polypeptide and the corresponding gene from several normal individuals is required to distinguish the mutation from a polymorphism. If a new polymorphism is identified, this polymorphic polypeptide can be used for further linkage analysis.

[0291] Furthermore, increased or decreased expression of the gene in affected individuals as compared to unaffected individuals can be assessed using the polynucleotides of the invention. Any of these alterations (altered expression, chromosomal rearrangement, or mutation) can be used as a diagnostic or prognostic marker.

[0292] Thus, the invention provides a method of detecting increased or decreased expression levels of the prostate cancer polynucleotides in affected individuals as compared to unaffected individuals using polynucleotides of the present invention and techniques known in the art, including but not limited to the method described in Example 11. Any of these alterations (altered expression, chromosomal rearrangement, or mutation) can be used as a diagnostic or prognostic marker.

[0293] Thus, the invention also provides a diagnostic method useful during diagnosis of a prostate related disorder, including prostate cancer, involving measuring the expression level of prostate cancer polynucleotides in prostate tissue or other cells or body fluid from an individual and comparing the measured gene expression level with a standard prostate cancer polynucleotide expression level, whereby an increase or decrease in the gene expression level compared to the standard is indicative of a prostate related disorder.

[0294] In still another embodiment, the invention includes a kit for analyzing samples for the presence of proliferative and/or cancerous polynucleotides derived from a test subject. In a general embodiment, the kit includes at least one polynucleotide probe containing a nucleotide sequence that will specifically hybridize with a polynucleotide of the invention and a suitable container. In a specific embodiment, the kit includes two polynucleotide probes defining an internal region of the polynucleotide of the invention, where each probe has one strand containing a 31′mer-end internal to the region. In a further embodiment, the probes may be useful as primers for polymerase chain reaction amplification.

[0295] Where a diagnosis of a prostate related disorder, including, for example, diagnosis of a tumor, has already been made according to conventional methods, the present invention is useful as a prognostic indicator, whereby patients exhibiting enhanced or depressed prostate cancer polynucleotide expression will experience a worse clinical outcome relative to patients expressing the gene at a level nearer the standard level.

[0296] By “measuring the expression level of prostate cancer polynucleotides” is intended qualitatively or quantitatively measuring or estimating the level of the prostate cancer polypeptide or the level of the mRNA encoding the prostate cancer polypeptide in a first biological sample either directly (e.g., by determining or estimating absolute protein level or mRNA level) or relatively (e.g., by comparing to the prostate cancer polypeptide level or mRNA level in a second biological sample). Preferably, the prostate cancer polypeptide level or mRNA level in the first biological sample is measured or estimated and compared to a standard prostate cancer polypeptide level or mRNA level, the standard being taken from a second biological sample obtained from an individual not having the prostate related disorder or being determined by averaging levels from a population of individuals not having a prostate related disorder. As will be appreciated in the art, once a standard prostate cancer polypeptide level or mRNA level is known, it can be used repeatedly as a standard for comparison.

[0297] By “biological sample” is intended any biological sample obtained from an individual, body fluid, cell line, tissue culture, or other source which contains prostate cancer polypeptide or the corresponding mRNA. As indicated, biological samples include body fluids (such as semen, lymph, sera, plasma, urine, synovial fluid and spinal fluid) which contain the prostate cancer polypeptide, prostate tissue, and other tissue sources found to express the prostate cancer polypeptide. Methods for obtaining tissue biopsies and body fluids from mammals are well known in the art. Where the biological sample is to include mRNA, a tissue biopsy is the preferred source.

[0298] The method(s) provided above may preferrably be applied in a diagnostic method and/or kits in which polynucleotides and/or polypeptides of the invention are attached to a solid support. In one exemplary method, the support may be a “gene chip” or a “biological chip” as described in U.S. Pat. No. 5,837,832, 5,874,219, and 5,856,174. Further, such a gene chip with prostate cancer polynucleotides attached may be used to identify polymorphisms between the prostate cancer polynucleotide sequences, with polynucleotides isolated from a test subject. The knowledge of such polymorphisms (i.e. their location, as well as, their existence) would be beneficial in identifying disease loci for many disorders, such as for example, in neural disorders, immune system disorders, muscular disorders, reproductive disorders, gastrointestinal disorders, pulmonary disorders, cardiovascular disorders, renal disorders, proliferative disorders, and/or cancerous diseases and conditions, though most preferably in prostate related proliferative, and/or cancerous diseases and conditions. Such a method is described in U.S. Pat. Nos. 5,858,659 and 5,856,104. The US Patents referenced supra are hereby incorporated by reference in their entirety herein.

[0299] The present invention encompasses prostate cancer polynucleotides that are chemically synthesized, or reproduced as peptide nucleic acids (PNA), or according to other methods known in the art. The use of PNAs would serve as the preferred form if the polynucleotides of the invention are incorporated onto a solid support, or gene chip. For the purposes of the present invention, a peptide nucleic acid (PNA) is a polyamide type of DNA analog and the monomeric units for adenine, guanine, thymine and cytosine are available commercially (Perceptive Biosystems). Certain components of DNA, such as phosphorus, phosphorus oxides, or deoxyribose derivatives, are not present in PNAs. As disclosed by P. E. Nielsen, M. Egholm, R. H. Berg and O. Buchardt, Science 254, 1497 (1991); and M. Egholm, O. Buchardt, L. Christensen, C. Behrens, S. M. Freier, D. A. Driver, R. H. Berg, S. K. Kim, B. Norden, and P. E. Nielsen, Nature 365, 666 (1993), PNAs bind specifically and tightly to complementary DNA strands and are not degraded by nucleases. In fact, PNA binds more strongly to DNA than DNA itself does. This is probably because there is no electrostatic repulsion between the two strands, and also the polyamide backbone is more flexible. Because of this, PNA/DNA duplexes bind under a wider range of stringency conditions than DNA/DNA duplexes, making it easier to perform multiplex hybridization. Smaller probes can be used than with DNA due to the strong binding. In addition, it is more likely that single base mismatches can be determined with PNA/DNA hybridization because a single mismatch in a PNA/DNA 15-mer lowers the melting point (T.sub.m) by 8°-20° C., vs. 4°-16° C. for the DNA/DNA 15-mer duplex. Also, the absence of charge groups in PNA means that hybridization can be done at low ionic strengths and reduce possible interference by salt during the analysis.

[0300] The present invention have uses which include, but are not limited to, detecting cancer in mammals. In particular the invention is useful during diagnosis of pathological cell proliferative neoplasias which include, but are not limited to: acute myelogenous leukemias including acute monocytic leukemia, acute myeloblastic leukemia, acute promyelocytic leukemia, acute myelomonocytic leukemia, acute erythroleukemia, acute megakaryocytic leukemia, and acute undifferentiated leukemia, etc.; and chronic myelogenous leukemias including chronic myelomonocytic leukemia, chronic granulocytic leukemia, etc. Preferred mammals include monkeys, apes, cats, dogs, cows, pigs, horses, rabbits and humans. Particularly preferred are humans.

[0301] Pathological cell proliferative disorders are often associated with inappropriate activation of proto-oncogenes. (Gelmann, E. P. et al., “The Etiology of Acute Leukemia: Molecular Genetics and Viral Oncology,” in Neoplastic Diseases of the Blood, Vol 1., Wiernik, P. H. et al. eds., 161-182 (1985)). Neoplasias are now believed to result from the qualitative alteration of a normal cellular gene product, or from the quantitative modification of gene expression by insertion into the chromosome of a viral sequence, by chromosomal translocation of a gene to a more actively transcribed region, or by some other mechanism. (Gelmann et al., supra) It is likely that mutated or altered expression of specific genes is involved in the pathogenesis of some leukemias, among other tissues and cell types. (Gelmann et al., supra) Indeed, the human counterparts of the oncogenes involved in some animal neoplasias have been amplified or translocated in some cases of human leukemia and carcinoma. (Gelmann et al., supra).

[0302] For example, c-myc expression is highly amplified in the non-lymphocytic leukemia cell line HL-60. When HL-60 cells are chemically induced to stop proliferation, the level of c-myc is found to be downregulated. (International Publication Number WO 91/15580). However, it has been shown that exposure of HL-60 cells to a DNA construct that is complementary to the 5′ end of c-myc or c-myb blocks translation of the corresponding mRNAs which downregulates expression of the c-myc or c-myb proteins and causes arrest of cell proliferation and differentiation of the treated cells. (International Publication Number WO 91/15580; Wickstrom et al., Proc. Natl. Acad. Sci. 85:1028 (1988); Anfossi et al., Proc. Natl. Acad. Sci. 86:3379 (1989)). However, the skilled artisan would appreciate the present invention's usefulness is not limited to treatment of proliferative disorders of hematopoietic cells and tissues, in light of the numerous cells and cell types of varying origins which are known to exhibit proliferative phenotypes.

[0303] In addition to the foregoing, a prostate cancer antigen polynucleotide can be used to control gene expression through triple helix formation or through antisense DNA or RNA. Antisense techniques are discussed, for example, in Okano, J. Neurochem. 56: 560 (1991); “Oligodeoxynucleotides as Antisense Inhibitors of Gene Expression, CRC Press, Boca Raton, Fla. (1988). Triple helix formation is discussed in, for instance Lee et al., Nucleic Acids Research 6: 3073 (1979); Cooney et al., Science 241: 456 (1988); and Dervan et al., Science 251: 1360 (1991). Both methods rely on binding of the polynucleotide to a complementary DNA or RNA. For these techniques, preferred polynucleotides are usually oligonucleotides 20 to 40 bases in length and complementary to either the region of the gene involved in transcription (triple helix—see Lee et al., Nucl. Acids Res. 6:3073 (1979); Cooney et al., Science 241:456 (1988); and Dervan et al., Science 251:1360 (1991) ) or to the mRNA itself (antisense—Okano, J. Neurochem. 56:560 (1991); Oligodeoxy-nucleotides as Antisense Inhibitors of Gene Expression, CRC Press, Boca Raton, Fla. (1988).) Triple helix formation optimally results in a shut-off of RNA transcription from DNA, while antisense RNA hybridization blocks translation of an mRNA molecule into polypeptide. The oligonucleotide described above can also be delivered to cells such that the antisense RNA or DNA may be expressed in vivo to inhibit production of polypeptide of the present invention antigens. Both techniques are effective in model systems, and the information disclosed herein can be used to design antisense or triple helix polynucleotides in an effort to treat disease, and in particular, for the treatment of proliferative diseases and/or conditions.

[0304] Polynucleotides of the present invention are also useful in gene therapy. One goal of gene therapy is to insert a normal gene into an organism having a defective gene, in an effort to correct the genetic defect. The polynucleotides disclosed in the present invention offer a means of targeting such genetic defects in a highly accurate manner. Another goal is to insert a new gene that was not present in the host genome, thereby producing a new trait in the host cell.

[0305] The polynucleotides are also useful for identifying individuals from minute biological samples. The United States military, for example, is considering the use of restriction fragment length polymorphism (RFLP) for identification of its personnel. In this technique, an individual's genomic DNA is digested with one or more restriction enzymes, and probed on a Southern blot to yield unique bands for identifying personnel. This method does not suffer from the current limitations of “Dog Tags” which can be lost, switched, or stolen, making positive identification difficult. The polynucleotides of the present invention can be used as additional DNA markers for RFLP.

[0306] The polynucleotides of the present invention can also be used as an alternative to RFLP, by determining the actual base-by-base DNA sequence of selected portions of an individual's genome. These sequences can be used to prepare PCR primers for amplifying and isolating such selected DNA, which can then be sequenced. Using this technique, individuals can be identified because each individual will have a unique set of DNA sequences. Once an unique ID database is established for an individual, positive identification of that individual, living or dead, can be made from extremely small tissue samples.

[0307] Forensic biology also benefits from using DNA-based identification techniques as disclosed herein. DNA sequences taken from very small biological samples such as tissues, e.g., hair or skin, or body fluids, e.g., blood, saliva, semen, synovial fluid, amniotic fluid, breast milk, lymph, pulmonary sputum or surfactant, urine, fecal matter, etc., can be amplified using PCR. In one prior art technique, gene sequences amplified from polymorphic loci, such as DQa class II HLA gene, are used in forensic biology to identify individuals. (Erlich, H., PCR Technology, Freeman and Co. (1992).) Once these specific polymorphic loci are amplified, they are digested with one or more restriction enzymes, yielding an identifying set of bands on a Southern blot probed with DNA corresponding to the DQa class II HLA gene. Similarly, polynucleotides of the present invention can be used as polymorphic markers for forensic purposes.

[0308] There is also a need for reagents capable of identifying the source of a particular tissue. Such need arises, for example, in forensics when presented with tissue of unknown origin. Appropriate reagents can comprise, for example, DNA probes or primers specific to prostate or prostate cancer polynucleotides prepared from the sequences of the present invention. Panels of such reagents can identify tissue by species and/or by organ type. In a similar fashion, these reagents can be used to screen tissue cultures for contamination.

[0309] The polynucleotides of the present invention are also useful as hybridization probes for differential identification of the tissue(s) or cell type(s) present in a biological sample. Similarly, polypeptides and antibodies directed to polypeptides of the present invention are useful to provide immunological probes for differential identification of the tissue(s) (e.g., immunohistochemistry assays) or cell type(s) (e.g., immunocytochemistry assays). In addition, for a number of disorders of the above tissues or cells, significantly higher or lower levels of gene expression of the polynucleotides/polypeptides of the present invention may be detected in certain tissues (e.g., tissues expressing polypeptides and/or polynucleotides of the present invention, prostate and prostate cancer tissues and/or cancerous and/or wounded tissues) or bodily fluids (e.g., serum, plasma, urine, synovial fluid or spinal fluid) taken from an individual having such a disorder, relative to a “standard” gene expression level, i.e., the expression level in healthy tissue from an individual not having the disorder.

[0310] Thus, the invention provides a diagnostic method of a disorder, which involves: (a) assaying gene expression level in cells or body fluid of an individual; (b) comparing the gene expression level with a standard gene expression level, whereby an increase or decrease in the assayed gene expression level compared to the standard expression level is indicative of a disorder.

[0311] In the very least, the polynucleotides of the present invention can be used as molecular weight markers on Southern gels, as diagnostic probes for the presence of a specific mRNA in a particular cell type, as a probe to “subtract-out” known sequences in the process of discovering novel polynucleotides, for selecting and making oligomers for attachment to a “gene chip” or other support, to raise anti-DNA antibodies using DNA immunization techniques, and as an antigen to elicit an immune response.

[0312] Uses of the Polypeptides

[0313] Each of the polypeptides identified herein can be used in numerous ways. The following description should be considered exemplary and utilizes known techniques.

[0314] Polypeptides and antibodies directed to polypeptides of the present invention are useful to provide immunological probes for differential identification of the tissue(s) (e.g., immunohistochemistry assays such as, for example, ABC immunoperoxidase (Hsu et al., J. Histochem. Cytochem. 29:577-580 (1981)) or cell type(s) (e.g., immunocytochemistry assays).

[0315] Antibodies can be used to assay levels of polypeptides encoded by polynucleotides of the invention in a biological sample using classical immunohistological methods known to those of skill in the art (e.g., see Jalkanen, et al., J. Cell. Biol. 101:976-985 (1985); Jalkanen, et al., J. Cell. Biol. 105:3087-3096 (1987)). Other antibody-based methods useful for detecting protein gene expression include immunoassays, such as the enzyme linked immunosorbent assay (ELISA) and the radioimmunoassay (RIA). Suitable antibody assay labels are known in the art and include enzyme labels, such as, glucose oxidase; radioisotopes, such as iodine (¹³¹I, ¹²⁵I, ¹²³I, ¹²¹I), carbon (¹⁴C), sulfur (³⁵S), tritium (³H), indium (^{115m}In, ^{113m}In, ¹¹²In, ¹¹¹In), and technetium (⁹⁹Tc, ^{99m}Tc), thallium (²⁰¹Ti), gallium (⁶⁸Ga, ⁶⁷Ga), palladium (¹⁰³Pd), molybdenum (⁹⁹Mo), xenon (¹³³Xe), fluorine (¹⁸F), ¹⁵³Sm, ¹⁷⁷Lu, ¹⁵⁹Gd, ¹⁴⁹Pm, ¹⁴⁰La, ¹⁷⁵Yb, ¹⁶⁶Ho, ⁹⁰Y, ⁴⁷Sc, ¹⁸⁶Re, ¹⁸⁸Re, ¹⁴²Pr, ¹⁰⁵Rh, ⁹⁷Ru; luminescent labels, such as luminol; and fluorescent labels, such as fluorescein and rhodamine, and biotin.

[0316] In addition to assaying levels of polypeptide of the present invention in a biological sample, proteins can also be detected in vivo by imaging. Antibody labels or markers for in vivo imaging of protein include those detectable by X-radiography, NMR or ESR. For X-radiography, suitable labels include radioisotopes such as barium or cesium, which emit detectable radiation but are not overtly harmful to the subject. Suitable markers for NMR and ESR include those with a detectable characteristic spin, such as deuterium, which may be incorporated into the antibody by labeling of nutrients for the relevant hybridoma.

[0317] A protein-specific antibody or antibody fragment which has been labeled with an appropriate detectable imaging moiety, such as a radioisotope (for example, ¹³¹I, ¹¹²In, ^{99m}Tc, (¹³¹I, ¹²⁵I, ¹²³I, ¹²¹I), carbon (¹⁴C), sulfur (³⁵S), tritium (³H), indium (^{115m}In, ^{113m}In, ¹¹²In, ¹¹¹In), and technetium (⁹⁹Tc, ^{99m}Tc), thallium (²⁰¹Ti), gallium (⁶⁸Ga, ⁶⁷Ga), palladium (¹⁰³Pd), molybdenum (⁹⁹Mo), xenon (¹³³Xe), fluorine (¹⁸F, ¹⁵³Sm, ¹⁷⁷Lu, ¹⁵⁹Gd, ¹⁴⁹Pm, ¹⁴⁰La, ¹⁷⁵Yb, ¹⁶⁶Ho, ⁹⁰Y, ⁴⁷Sc, ¹⁸⁶Re, ¹⁸⁸Re, ¹⁴²Pr, ¹⁰⁵Rh, ⁹⁷Ru), a radio-opaque substance, or a material detectable by nuclear magnetic resonance, is introduced (for example, parenterally, subcutaneously or intraperitoneally) into the mammal to be examined for immune system disorder. It will be understood in the art that the size of the subject and the imaging system used will determine the quantity of imaging moiety needed to produce diagnostic images. In the case of a radioisotope moiety, for a human subject, the quantity of radioactivity injected will normally range from about 5 to 20 millicuries of ^{99m}Tc. The labeled antibody or antibody fragment will then preferentially accumulate at the location of cells which express the polypeptide encoded by a polynucleotide of the invention. In vivo tumor imaging is described in S. W. Burchiel et al., “Immunopharmacokinetics of Radiolabeled Antibodies and Their Fragments” (Chapter 13 in Tumor Imaging: The Radiochemical Detection of Cancer, S. W. Burchiel and B. A. Rhodes, eds., Masson Publishing Inc. (1982)).

[0318] In one embodiment, the invention provides a method for the specific delivery of compositions of the invention to cells by administering polypeptides of the invention (e.g., polypeptides encoded by polynucleotides of the invention and/or antibodies) that are associated with heterologous polypeptides or nucleic acids. In one example, the invention provides a method for delivering a therapeutic protein into the targeted cell. In another example, the invention provides a method for delivering a single stranded nucleic acid (e.g., antisense or ribozymes) or double stranded nucleic acid (e.g., DNA that can integrate into the cell's genome or replicate episomally and that can be transcribed) into the targeted cell.

[0319] In another embodiment, the invention provides a method for the specific destruction of cells (e.g., the destruction of tumor cells) by administering polypeptides of the invention in association with toxins or cytotoxic prodrugs.

[0320] In a preferred embodiment, the invention provides a method for the specific destruction of prostate cells (e.g., aberrant prostate cells, prostate neoplasm) by administering polypeptides of the invention (e.g., polypeptides encoded by polynucleotides of the invention and/or antibodies) in association with toxins or cytotoxic prodrugs.

[0321] By “toxin” is meant one or more compounds that bind and activate endogenous cytotoxic effector systems, radioisotopes, holotoxins, modified toxins, catalytic subunits of toxins, or any molecules or enzymes not normally present in or on the surface of a cell that under defined conditions cause the cell's death. Toxins that may be used according to the methods of the invention include, but are not limited to, radioisotopes known in the art, compounds such as, for example, antibodies (or complement fixing containing portions thereof) that bind an inherent or induced endogenous cytotoxic effector system, thymidine kinase, endonuclease, RNAse, alpha toxin, ricin, abrin, Pseudomonas exotoxin A, diphtheria toxin, saporin, momordin, gelonin, pokeweed antiviral protein, alpha-sarcin and cholera toxin. “Toxin” also includes a cytostatic or cytocidal agent, a therapeutic agent or a radioactive metal ion, e.g., alpha-emitters such as, for example, ²¹³Bi, or other radioisotopes such as, for example, ¹⁰³Pd, ¹³³Xe, ¹³¹I, ⁶⁸Ge, ⁵⁷Co, ⁶⁵Zn, ⁸⁵Sr, ³²P, ³⁵S, ⁹⁰Y, ¹⁵³Sm, ¹⁵³Gd, ¹⁶⁹Yb, ⁵¹Cr, ⁵⁴Mn, ⁷⁵Se, ¹¹³Sn, ⁹⁰Yttrium, ¹¹⁷Tin, ¹⁸⁶Rhenium, ¹⁶⁶Holmium, and ¹⁸⁸Rhenium; luminescent labels, such as luminol; and fluorescent labels, such as fluorescein and rhodamine, and biotin.

[0322] In a specific embodiment, the invention provides a method for the specific destruction of cells (e.g., the destruction of tumor cells) by administering polypeptides of the invention or antibodies of the invention in association with the radioisotope ⁹⁰Y. In another specific embodiment, the invention provides a method for the specific destruction of cells (e.g., the destruction of tumor cells) by administering polypeptides of the invention or antibodies of the invention in association with the radioisotope ¹¹¹In. In a further specific embodiment, the invention provides a method for the specific destruction of cells (e.g., the destruction of tumor cells) by administering polypeptides of the invention or antibodies of the invention in association with the radioisotope ¹³¹I.

[0323] Techniques known in the art may be applied to label polypeptides of the invention (including antibodies). Such techniques include, but are not limited to, the use of bifunctional conjugating agents (see e.g., U.S. Pat. Nos. 5,756,065; 5,714,631; 5,696,239; 5,652,361; 5,505,931; 5,489,425; 5,435,990; 5,428,139; 5,342,604; 5,274,119; 4,994,560; and 5,808,003; the contents of each of which are hereby incorporated by reference in its entirety).

[0324] Thus, the invention provides a diagnostic method of a disorder, which involves (a) assaying the expression level of a prostate cancer polypeptide of the present invention in cells or body fluid of an individual, or more preferrably, assaying the expression level of a prostate cancer polypeptide of the present invention in prostate cells or semen of an individual; and (b) comparing the assayed polypeptide expression level with a standard polypeptide expression level, whereby an increase or decrease in the assayed polypeptide expression level compared to the standard expression level is indicative of a disorder. With respect to cancer, the presence of a relatively high amount of transcript in biopsied tissue from an individual may indicate a predisposition for the development of the disease, or may provide a means for detecting the disease prior to the appearance of actual clinical symptoms. A more definitive diagnosis of this type may allow health professionals to employ preventative measures or aggressive treatment earlier thereby preventing the development or further progression of the cancer.

[0325] Moreover, prostate cancer antigen polypeptides of the present invention can be used to treat or prevent diseases or conditions such as, for example, neural disorders, immune system disorders, muscular disorders, reproductive disorders, gastrointestinal disorders, pulmonary disorders, cardiovascular disorders, renal disorders, proliferative disorders, and/or cancerous diseases and conditions, preferably proliferative disorders of the prostate, and/or cancerous disease and conditions. Preferably, polypeptides of the present invention can be used to treat or prevent diseases or conditions of the prostate such as, for example, prostate cancers such as adenocarcinoma, transitional cell carcinomas, ductal carcinomas, and squamous cell carcinomas, and as described under “Hyperproliferative Disorders” and/or “Reproductive System Disorders” below. For example, patients can be administered a polypeptide of the present invention in an effort to replace absent or decreased levels of the polypeptide (e.g., insulin), to supplement absent or decreased levels of a different polypeptide (e.g., hemoglobin S for hemoglobin B, SOD, catalase, DNA repair proteins), to inhibit the activity of a polypeptide (e.g., an oncogene or tumor supressor), to activate the activity of a polypeptide (e.g., by binding to a receptor), to reduce the activity of a membrane bound receptor by competing with it for free ligand (e.g., soluble TNF receptors used in reducing inflammation), or to bring about a desired response (e.g., blood vessel growth inhibition, enhancement of the immune response to proliferative cells or tissues).

[0326] Similarly, antibodies directed to a polypeptide of the present invention can also be used to treat disease (as described supra, and elsewhere herein). For example, administration of an antibody directed to a polypeptide of the present invention can bind, and/or neutralize the polypeptide, and/or reduce overproduction of the polypeptide. Similarly, administration of an antibody can activate the polypeptide, such as by binding to a polypeptide bound to a membrane (receptor).

[0327] At the very least, the polypeptides of the present invention can be used as molecular weight markers on SDS-PAGE gels or on molecular sieve gel filtration columns using methods well known to those of skill in the art. Polypeptides can also be used to raise antibodies, which in turn are used to measure protein expression from a recombinant cell, as a way of assessing transformation of the host cell. Moreover, the polypeptides of the present invention can be used to test the following biological activities.

[0328] Diagnostic Asssays

[0329] The compounds of the present invention are useful for diagnosis, treatment, prevention and/or prognosis of various prostate-related disorders in mammals, preferably humans. Such disorders include, but are not limited to, prostate cancers such as adenocarcinoma, transitional cell carcinomas, ductal carcinomas, and squamous cell carcinomas, and as described under “Hyperproliferative Disorders” and/or “Reproductive System Disorders” below.

[0330] Prostate cancer antigens are expressed in the prostate. For a number of prostate-related disorders, substantially altered (increased or decreased) levels of prostate cancer antigen gene expression can be detected in prostate cancer tissue or other cells or bodily fluids (e.g., sera, plasma, urine, semen, synovial fluid or spinal fluid) taken from an individual having such a disorder, relative to a “standard” prostate cancer antigen gene expression level, that is, the prostate cancer antigen expression level in prostate tissues or bodily fluids from an individual not having the prostate disorder. Thus, the invention provides a diagnostic method useful during diagnosis of a prostate disorder, which involves measuring the expression level of the gene encoding the prostate cancer associated polypeptide in prostate tissue or other cells or body fluid from an individual and comparing the measured gene expression level with a standard prostate cancer antigens gene expression level, whereby an increase or decrease in the gene expression level(s) compared to the standard is indicative of an prostate disorder.

[0331] In specific embodiments, the invention provides a diagnostic method useful during diagnosis of a disorder of a normal or diseased tissue/cell source, which involves measuring the expression level of the coding sequence of a polynucleotide sequence associated with this tissue/cell source as disclosed by Tables 1 and 5 in the tissue/cell source or other cells or body fluid from an individual and comparing the expression level of the coding sequence with a standard expression level of the coding sequence of a polynucleotide sequence, whereby an increase or decrease in the gene expression level(s) compared to the standard is indicative of a disorder of a normal or diseased tissue/cell source.

[0332] In particular, it is believed that certain tissues in mammals with cancer of cells or tissue of the prostate express significantly enhanced or reduced levels of normal or altered prostate cancer antigen expression and mRNA encoding the prostate cancer associated polypeptide when compared to a corresponding “standard” level. Further, it is believed that enhanced or depressed levels of the prostate cancer associated polypeptide can be detected in certain body fluids (e.g., sera, plasma, urine, and spinal fluid) or cells or tissue from mammals with such a cancer when compared to sera from mammals of the same species not having the cancer.

[0333] For example, as disclosed herein, prostate cancer associated polypeptides of the invention are expressed in the prostate. Accordingly, polynucleotides of the invention (e.g., polynucleotide sequences complementary to all or a portion of a prostate cancer antigen mRNA nucleotide sequence of SEQ ID NO:X, the nucleotide coding sequence of the related cDNA contained in a deposited library, a nucleotide sequence encoding SEQ ID NO:Y, a nucleotide sequence encoding a polypeptide encoded by SEQ ID NO:X, the nucleotide sequence encoding the polypeptide encoded by the cDNA in the related cDNA contained in a deposited library, polynucleotide fragments of any of these nucleic acid molecules (e.g., those fragments described herein), and/or antibodies (and antibody fragments) directed against the polypeptides of the invention may be used to quantitate or qualitate concentrations of cells of the prostate cancer expressing prostate cancer antigens, preferrably on their cell surfaces. These polynucleotides and antibodies additionally have diagnostic applications in detecting abnormalities in the level of prostate cancer antigens gene expression, or abnormalities in the structure and/or temporal, tissue, cellular, or subcellular location of prostate cancer antigens. These diagnostic assays may be performed in vivo or in vitro, such as, for example, on blood samples, biopsy tissue or autopsy tissue.

[0334] Thus, the invention provides a diagnostic method useful during diagnosis of a prostate disorder, including cancers, which involves measuring the expression level of the gene encoding the prostate cancer antigen polypeptide in prostate tissue or other cells or body fluid from an individual and comparing the measured gene expression level with a standard prostate cancer antigen gene expression level, whereby an increase or decrease in the gene expression level compared to the standard is indicative of a prostate disorder.

[0335] Where a diagnosis of a disorder in the prostate, including diagnosis of a tumor, has already been made according to conventional methods, the present invention is useful as a prognostic indicator, whereby patients exhibiting enhanced or depressed prostate cancer antigen gene expression will experience a worse clinical outcome relative to patients expressing the gene at a level nearer the standard level.

[0336] By “assaying the expression level of the gene encoding the prostate cancer associated polypeptide” is intended qualitatively or quantitatively measuring or estimating the level of the prostate cancer antigen polypeptide or the level of the mRNA encoding the prostate cancer antigen polypeptide in a first biological sample either directly (e.g., by determining or estimating absolute protein level or mRNA level) or relatively (e.g., by comparing to the prostate cancer associated polypeptide level or mRNA level in a second biological sample). Preferably, the prostate cancer antigen polypeptide expression level or mRNA level in the first biological sample is measured or estimated and compared to a standard prostate cancer antigen polypeptide level or mRNA level, the standard being taken from a second biological sample obtained from an individual not having the disorder or being determined by averaging levels from a population of individuals not having a disorder of the prostate. As will be appreciated in the art, once a standard prostate cancer antigen polypeptide level or mRNA level is known, it can be used repeatedly as a standard for comparison.

[0337] By “biological sample” is intended any biological sample obtained from an individual, cell line, tissue culture, or other source containing prostate cancer antigen polypeptides (including portions thereof) or mRNA. As indicated, biological samples include body fluids (such as sera, plasma, urine, synovial fluid and spinal fluid) which contain cells expressing prostate cancer antigen polypeptides, prostate tissue, and other tissue sources found to express the full length or fragments thereof of a prostate cancer antigen. Methods for obtaining tissue biopsies and body fluids from mammals are well known in the art. Where the biological sample is to include mRNA, a tissue biopsy is the preferred source.

[0338] Total cellular RNA can be isolated from a biological sample using any suitable technique such as the single-step guanidinium-thiocyanate-phenol-chloroform method described in Chomczynski and Sacchi, Anal. Biochem. 162:156-159 (1987). Levels of mRNA encoding the prostate cancer antigen polypeptides are then assayed using any appropriate method. These include Northern blot analysis, SI nuclease mapping, the polymerase chain reaction (PCR), reverse transcription in combination with the polymerase chain reaction (RT-PCR), and reverse transcription in combination with the ligase chain reaction (RT-LCR).

[0339] The present invention also relates to diagnostic assays such as quantitative and diagnostic assays for detecting levels of prostate cancer antigen polypeptides, in a biological sample (e.g., cells and tissues), including determination of normal and abnormal levels of polypeptides. Thus, for instance, a diagnostic assay in accordance with the invention for detecting over-expression of prostate cancer antigens compared to normal control tissue samples may be used to detect the presence of tumors. Assay techniques that can be used to determine levels of a polypeptide, such as a prostate cancer antigen polypeptide of the present invention in a sample derived from a host are well-known to those of skill in the art. Such assay methods include radioimmunoassays, competitive-binding assays, Western Blot analysis and ELISA assays. Assaying prostate cancer antigen polypeptide levels in a biological sample can occur using any art-known method.

[0340] Assaying prostate cancer antigen polypeptide levels in a biological sample can occur using antibody-based techniques. For example, prostate cancer antigen polypeptide expression in tissues can be studied with classical immunohistological methods (Jalkanen et al., J. Cell. Biol. 101:976-985 (1985); Jalkanen, M., et al., J. Cell. Biol. 105:3087-3096 (1987)). Other antibody-based methods useful for detecting prostate cancer antigen polypeptide gene expression include immunoassays, such as the enzyme linked immunosorbent assay (ELISA) and the radioimmunoassay (RIA). Suitable antibody assay labels are known in the art and include enzyme labels, such as, glucose oxidase, and radioisotopes, such as iodine (¹²⁵I, ¹²¹I), carbon (¹⁴C), sulfur (³⁵S), tritium (³H), indium (¹¹²In), and technetium (^{99m}Tc), and fluorescent labels, such as fluorescein and rhodamine, and biotin.

[0341] The tissue or cell type to be analyzed will generally include those which are known, or suspected, to express the prostate cancer antigen gene (such as, for example, cells of the prostate or prostate cancer). The protein isolation methods employed herein may, for example, be such as those described in Harlow and Lane (Harlow, E. and Lane, D., 1988, “Antibodies: A Laboratory Manual”, Cold Spring Harbor Laboratory Press, Cold Spring Harbor, N.Y.), which is incorporated herein by reference in its entirety. The isolated cells can be derived from cell culture or from a patient. The analysis of cells taken from culture may be a necessary step in the assessment of cells that could be used as part of a cell-based gene therapy technique or, alternatively, to test the effect of compounds on the expression of the prostate cancer antigen gene.

[0342] For example, antibodies, or fragments of antibodies, such as those described herein, may be used to quantitatively or qualitatively detect the presence of prostate cancer antigen gene products or conserved variants or peptide fragments thereof. This can be accomplished, for example, by immunofluorescence techniques employing a fluorescently labeled antibody coupled with light microscopic, flow cytometric, or fluorimetric detection.

[0343] In a preferred embodiment, antibodies, or fragments of antibodies directed to any one or all of the predicted epitope domains of the prostate cancer antigen polypeptides (Shown in Table 4) may be used to quantitatively or qualitatively detect the presence of prostate cancer antigen gene products or conserved variants or peptide fragments thereof. This can be accomplished, for example, by immunofluorescence techniques employing a fluorescently labeled antibody coupled with light microscopic, flow cytometric, or fluorimetric detection.

[0344] In an additional preferred embodiment, antibodies, or fragments of antibodies directed to a conformational epitope of a prostate cancer antigen may be used to quantitatively or qualitatively detect the presence of prostate cancer antigen gene products or conserved variants or peptide fragments thereof. This can be accomplished, for example, by immunofluorescence techniques employing a fluorescently labeled antibody coupled with light microscopic, flow cytometric, or fluorimetric detection.

[0345] The antibodies (or fragments thereof), and/or prostate cancer antigen polypeptides of the present invention may, additionally, be employed histologically, as in immunofluorescence, immunoelectron microscopy or non-immunological assays, for in situ detection of prostate cancer antigen gene products or conserved variants or peptide fragments thereof. In situ detection may be accomplished by removing a histological specimen from a patient, and applying thereto a labeled antibody or prostate cancer antigen polypeptide of the present invention. The antibody (or fragment thereof) or prostate cancer antigen polypeptide is preferably applied by overlaying the labeled antibody (or fragment) onto a biological sample. Through the use of such a procedure, it is possible to determine not only the presence of the prostate cancer antigen gene product, or conserved variants or peptide fragments, or prostate cancer antigen polypeptide binding, but also its distribution in the examined tissue. Using the present invention, those of ordinary skill will readily perceive that any of a wide variety of histological methods (such as staining procedures) can be modified in order to achieve such in situ detection.

[0346] Immunoassays and non-immunoassays for prostate cancer antigen gene products or conserved variants or peptide fragments thereof will typically comprise incubating a sample, such as a biological fluid, a tissue extract, freshly harvested cells, or lysates of cells which have been incubated in cell culture, in the presence of a detectably labeled antibody capable of binding prostate cancer antigen gene products or conserved variants or peptide fragments thereof, and detecting the bound antibody by any of a number of techniques well-known in the art.

[0347] The biological sample may be brought in contact with and immobilized onto a solid phase support or carrier such as nitrocellulose, or other solid support which is capable of immobilizing cells, cell particles or soluble proteins. The support may then be washed with suitable buffers followed by treatment with the detectably labeled anti-prostate cancer antigen antibody or detectable prostate cancer antigen polypeptide. The solid phase support may then be washed with the buffer a second time to remove unbound antibody or polypeptide. Optionally the antibody is subsequently labeled. The amount of bound label on solid support may then be detected by conventional means.

[0348] By “solid phase support or carrier” is intended any support capable of binding an antigen or an antibody. Well-known supports or carriers include glass, polystyrene, polypropylene, polyethylene, dextran, nylon, amylases, natural and modified celluloses, polyacrylamides, gabbros, and magnetite. The nature of the carrier can be either soluble to some extent or insoluble for the purposes of the present invention. The support material may have virtually any possible structural configuration so long as the coupled molecule is capable of binding to an antigen or antibody. Thus, the support configuration may be spherical, as in a bead, or cylindrical, as in the inside surface of a test tube, or the external surface of a rod. Alternatively, the surface may be flat such as a sheet, test strip, etc. Preferred supports include polystyrene beads. Those skilled in the art will know many other suitable carriers for binding antibody or antigen, or will be able to ascertain the same by use of routine experimentation.

[0349] The binding activity of a given lot of anti-prostate cancer antigen antibody or prostate cancer antigen polypeptide may be determined according to well known methods. Those skilled in the art will be able to determine operative and optimal assay conditions for each determination by employing routine experimentation.

[0350] In addition to assaying prostate cancer antigen polypeptide levels or polynucleotide levels in a biological sample obtained from an individual, prostate cancer antigen polypeptide or polynucleotide can also be detected in vivo by imaging. For example, in one embodiment of the invention, prostate cancer antigen polypeptide and/or anti-prostate cancer antigen antibodies are used to image prostate diseased cells, such as neoplasms. In another embodiment, prostate cancer antigen polynucleotides of the invention (e.g., polynucleotides complementary to all or a portion of prostate cancer antigen mRNA) and/or anti-prostate cancer antigen antibodies (e.g., antibodies directed to any one or a combination of the epitopes of prostate cancer antigens, antibodies directed to a conformational epitope of prostate cancer antigens, antibodies directed to the full length polypeptide expressed on the cell surface of a mammalian cell) are used to image diseased or neoplastic cells of the prostate.

[0351] Antibody labels or markers for in vivo imaging of prostate cancer antigen polypeptides include those detectable by X-radiography, NMR, MRI, CAT-scans or ESR. For X-radiography, suitable labels include radioisotopes such as barium or cesium, which emit detectable radiation but are not overtly harmful to the subject. Suitable markers for NMR and ESR include those with a detectable characteristic spin, such as deuterium, which may be incorporated into the antibody by labeling of nutrients for the relevant hybridoma. Where in vivo imaging is used to detect enhanced levels of prostate cancer antigen polypeptides for diagnosis in humans, it may be preferable to use human antibodies or “humanized” chimeric monoclonal antibodies. Such antibodies can be produced using techniques described herein or otherwise known in the art. For example methods for producing chimeric antibodies are known in the art. See, for review, Morrison, Science 229:1202 (1985); Oi et al., BioTechniques 4:214 (1986); Cabilly et al., U.S. Pat. No. 4,816,567; Taniguchi et al., EP 171496; Morrison et al., EP 173494; Neuberger et al., WO 8601533; Robinson et al., WO 8702671; Boulianne et al., Nature 312:643 (1984); Neuberger et al., Nature 314:268 (1985).

[0352] Additionally, any prostate cancer antigen polypeptides whose presence can be detected, can be administered. For example, prostate cancer antigen polypeptides labeled with a radio-opaque or other appropriate compound can be administered and visualized in vivo, as discussed, above for labeled antibodies. Further such prostate cancer antigen polypeptides can be utilized for in vitro diagnostic procedures.

[0353] A prostate cancer antigen polypeptide-specific antibody or antibody fragment which has been labeled with an appropriate detectable imaging moiety, such as a radioisotope (for example, ¹³¹I, ¹¹²In, ^{99m}Tc), a radio-opaque substance, or a material detectable by nuclear magnetic resonance, is introduced (for example, parenterally, subcutaneously or intraperitoneally) into the mammal to be examined for a prostate disorder. It will be understood in the art that the size of the subject and the imaging system used will determine the quantity of imaging moiety needed to produce diagnostic images. In the case of a radioisotope moiety, for a human subject, the quantity of radioactivity injected will normally range from about 5 to 20 millicuries of ^{99m}Tc. The labeled antibody or antibody fragment will then preferentially accumulate at the location of cells which contain prostate cancer antigen protein. In vivo tumor imaging is described in S. W. Burchiel et al., “Immunopharmacokinetics of Radiolabeled Antibodies and Their Fragments” (Chapter 13 in Tumor Imaging: The Radiochemical Detection of Cancer, S. W. Burchiel and B. A. Rhodes, eds., Masson Publishing Inc. (1982)).

[0354] With respect to antibodies, one of the ways in which the anti-prostate cancer antigen antibody can be detectably labeled is by linking the same to an enzyme and using the linked product in an enzyme immunoassay (EIA) (Voller, A., “The Enzyme Linked Immunosorbent Assay (ELISA)”, 1978, Diagnostic Horizons 2:1-7, Microbiological Associates Quarterly Publication, Walkersville, Md.); Voller et al., J. Clin. Pathol. 31:507-520 (1978); Butler, J. E., Meth. Enzymol. 73:482-523 (1981); Maggio, E. (ed.), 1980, Enzyme Immunoassay, CRC Press, Boca Raton, Fla.; Ishikawa, E. et al., (eds.), 1981, Enzyme Immunoassay, Kgaku Shoin, Tokyo). The enzyme, which is bound to the antibody will react with an appropriate substrate, preferably a chromogenic substrate, in such a manner as to produce a chemical moiety which can be detected, for example, by spectrophotometric, fluorimetric or by visual means. Enzymes which can be used to detectably label the antibody include, but are not limited to, malate dehydrogenase, staphylococcal nuclease, delta-5-steroid isomerase, yeast alcohol dehydrogenase, alpha-glycerophosphate, dehydrogenase, triose phosphate isomerase, horseradish peroxidase, alkaline phosphatase, asparaginase, glucose oxidase, beta-galactosidase, ribonuclease, urease, catalase, glucose-6-phosphate dehydrogenase, glucoamylase and acetylcholinesterase. Additionally, the detection can be accomplished by colorimetric methods which employ a chromogenic substrate for the enzyme. Detection may also be accomplished by visual comparison of the extent of enzymatic reaction of a substrate in comparison with similarly prepared standards.

[0355] Detection may also be accomplished using any of a variety of other immunoassays. For example, by radioactively labeling the antibodies or antibody fragments, it is possible to detect prostate cancer antigens through the use of a radioimmunoassay (RIA) (see, for example, Weintraub, B., Principles of Radioimmunoassays, Seventh Training Course on Radioligand Assay Techniques, The Endocrine Society, March, 1986, which is incorporated by reference herein). The radioactive isotope can be detected by means including, but not limited to, a gamma counter, a scintillation counter, or autoradiography.

[0356] It is also possible to label the antibody with a fluorescent compound. When the fluorescently labeled antibody is exposed to light of the proper wave length, its presence can then be detected due to fluorescence. Among the most commonly used fluorescent labeling compounds are fluorescein isothiocyanate, rhodamine, phycoerythrin, phycocyanin, allophycocyanin, ophthaldehyde and fluorescamine.

[0357] The antibody can also be detectably labeled using fluorescence emitting metals such as ¹⁵²Eu, or others of the lanthanide series. These metals can be attached to the antibody using such metal chelating groups as diethylenetriaminepentacetic acid (DTPA) or ethylenediaminetetraacetic acid (EDTA).

[0358] The antibody also can be detectably labeled by coupling it to a chemiluminescent compound. The presence of the chemiluminescent-tagged antibody is then determined by detecting the presence of luminescence that arises during the course of a chemical reaction. Examples of particularly useful chemiluminescent labeling compounds are luminol, isoluminol, theromatic acridinium ester, imidazole, acridinium salt and oxalate ester.

[0359] Likewise, a bioluminescent compound may be used to label the antibody of the present invention. Bioluminescence is a type of chemiluminescence found in biological systems in, which a catalytic protein increases the efficiency of the chemiluminescent reaction. The presence of a bioluminescent protein is determined by detecting the presence of luminescence. Important bioluminescent compounds for purposes of labeling are luciferin, luciferase and aequorin.

[0360] Methods for Detecting Prostate Disease, Including Cancer

[0361] In general, a prostate disease or cancer may be detected in a patient based on the presence of one or more prostate cancer antigen proteins of the invention and/or polynucleotides encoding such proteins in a biological sample (for example, blood, sera, urine, and/or tumor biopsies) obtained from the patient. In other words, such proteins and/or polynucleotides may be used as markers to indicate the presence or absence of a prostate disease or disorder, including cancer. Cancers that may be diagnosed, and/or prognosed using the compositions of the invention include but are not limited to, prostate cancer. The binding agents provided herein generally permit detection of the level of antigen that binds to the agent in the biological sample. Polynucleotide primers and probes may be used to detect the level of mRNA encoding prostate cancer antigen polypeptides, which is also indicative of the presence or absence of a prostate disease or disorder, including cancer. In general, prostate cancer antigen polypeptides should be present at a level that is at least three fold higher in diseased tissue than in normal tissue.

[0362] There are a variety of assay formats known to those of ordinary skill in the art for using a binding agent to detect polypeptide markers in a sample. See, e.g., Harlow and Lane, supra. In general, the presence or absence of a prostate disease in a patient may be determined by (a) contacting a biological sample obtained from a patient with a binding agent; (b) detecting in the sample a level of polypeptide that binds to the binding agent; and (c) comparing the level of polypeptide with a predetermined cut-off value.

[0363] In a preferred embodiment, the assay involves the use of binding agent immobilized on a solid support to bind to and remove the prostate cancer antigen polypeptide of the invention from the remainder of the sample. The bound polypeptide may then be detected using a detection reagent that contains a reporter group and specifically binds to the binding agent/polypeptide complex. Such detection reagents may comprise, for example, a binding agent that specifically binds to the polypeptide or an antibody or other agent that specifically binds to the binding agent, such as an anti-immunoglobulin, protein G, protein A or a lectin. Alternatively, a competitive assay may be utilized, in which a polypeptide is labeled with a reporter group and allowed to bind to the immobilized binding agent after incubation of the binding agent with the sample. The extent to which components of the sample inhibit the binding of the labeled polypeptide to the binding agent is indicative of the reactivity of the sample with the immobilized binding agent. Suitable polypeptides for use within such assays include prostate cancer antigen polypeptides and portions thereof, or antibodies, to which the binding agent binds, as described above.

[0364] The solid support may be any material known to those of skill in the art to which prostate cancer antigen polypeptides of the invention may be attached. For example, the solid support may be a test well in a microtiter plate or a nitrocellulose or other suitable membrane. Alternatively, the support may be a bead or disc, such as glass fiberglass, latex or a plastic material such as polystyrene or polyvinylchloride. The support may also be a magnetic particle or a fiber optic sensor, such as those disclosed, for example, in U.S. Pat. No. 5,359,681. The binding agent may be immobilized on the solid support using a variety of techniques known to those of skill in the art, which are amply described in the patent and scientific literature. In the context of the present invention, the term “immobilization” refers to both noncovalent association, such as adsorption, and covalent attachment (which may be a direct linkage between the agent and functional groups on the support or may be a linkage by way of a cross-linking agent). Immobilization by adsorption to a well in a microtiter plate or to a membrane is preferred. In such cases, adsorption may be achieved by contacting the binding agent, in a suitable buffer, with the solid support for the suitable amount of time. The contact time varies with temperature, but is typically between about 1 hour and about 1 day. In general, contacting a well of plastic microtiter plate (such as polystyrene or polyvinylchloride) with an amount of binding agent ranging from about 10 ng to about 10 ug, and preferably about 100 ng to about 1 ug, is sufficient to immobilize an adequate amount of binding agent.

[0365] Covalent attachment of binding agent to a solid support may generally be achieved by first reacting the support with a bifunctional reagent that will react with both the support and a functional group, such as a hydroxyl or amino group, on the binding agent. For example, the binding agent may be covalently attached to supports having an appropriate polymer coating using benzoquinone or by condensation of an aldehyde group on the support with an amine and an active hydrogen on the binding partner (see, e.g., Pierce Immunotechnology Catalog and Handbook, 1991, at A12-A13).

[0366] Gene Therapy Methods

[0367] Another aspect of the present invention is to gene therapy methods for treating or preventing disorders, diseases and conditions. The gene therapy methods relate to the introduction of nucleic acid (DNA, RNA and antisense DNA or RNA) sequences into an animal to achieve expression of the polypeptide of the present invention. This method requires a polynucleotide which codes for a polypeptide of the present invention operatively linked to a promoter and any other genetic elements necessary for the expression of the polypeptide by the target tissue. Such gene therapy and delivery techniques are known in the art, see, for example, WO90/11092, which is herein incorporated by reference.

[0368] Thus, for example, cells from a patient may be engineered with a polynucleotide (DNA or RNA) comprising a promoter operably linked to a polynucleotide of the present invention ex vivo, with the engineered cells then being provided to a patient to be treated with the polypeptide of the present invention. Such methods are well-known in the art. For example, see Belldegrun, A., et al., J. Natl. Cancer Inst. 85: 207-216 (1993); Ferrantini, M. et al., Cancer Research 53: 1107-1112 (1993); Ferrantini, M. et al., J. Immunology 153: 4604-4615 (1994); Kaido, T., et al., Int. J. Cancer 60: 221-229 (1995); Ogura, H., et al., Cancer Research 50: 5102-5106 (1990); Santodonato, L., et al., Human Gene Therapy 7:1-10 (1996); Santodonato, L., et al., Gene Therapy 4:1246-1255 (1997); and Zhang, J.-F. et al., Cancer Gene Therapy 3: 31-38 (1996)), which are herein incorporated by reference. In one embodiment, the cells which are engineered are arterial cells. The arterial cells may be reintroduced into the patient through direct injection to the artery, the tissues surrounding the artery, or through catheter injection.

[0369] As discussed in more detail below, the polynucleotide constructs can be delivered by any method that delivers injectable materials to the cells of an animal, such as, injection into the interstitial space of tissues (heart, muscle, skin, lung, liver, and the like). The polynucleotide constructs may be delivered in a pharmaceutically acceptable liquid or aqueous carrier.

[0370] In one embodiment, the polynucleotide of the present invention is delivered as a naked polynucleotide. The term “naked” polynucleotide, DNA or RNA refers to sequences that are free from any delivery vehicle that acts to assist, promote or facilitate entry into the cell, including viral sequences, viral particles, liposome formulations, lipofectin or precipitating agents and the like. However, the polynucleotide of the present invention can also be delivered in liposome formulations and lipofectin formulations and the like can be prepared by methods well known to those skilled in the art. Such methods are described, for example, in U.S. Pat. Nos. 5,593,972, 5,589,466, and 5,580,859, which are herein incorporated by reference.

[0371] The polynucleotide vector constructs used in the gene therapy method are preferably constructs that will not integrate into the host genome nor will they contain sequences that allow for replication. Appropriate vectors include pWLNEO, pSV2CAT, pOG44, pXT1 and pSG available from Stratagene; pSVK3, pBPV, pMSG and pSVL available from Pharmacia; and pEF1/V5, pcDNA3.1, and pRc/CMV2 available from Invitrogen. Other suitable vectors will be readily apparent to the skilled artisan.

[0372] Any strong promoter known to those skilled in the art can be used for driving the expression of the polynucleotide sequence. Suitable promoters include adenoviral promoters, such as the adenoviral major late promoter; or heterologous promoters, such as the cytomegalovirus (CMV) promoter; the respiratory syncytial virus (RSV) promoter; inducible promoters, such as the NM promoter, the metallothionein promoter; heat shock promoters; the albumin promoter; the ApoA1 promoter; human globin promoters; viral thymidine kinase promoters, such as the Herpes Simplex thymidine kinase promoter; retroviral LTRs; the b-actin promoter; and human growth hormone promoters. The promoter also may be the native promoter for the polynucleotide of the present invention.

[0373] Unlike other gene therapy techniques, one major advantage of introducing naked nucleic acid sequences into target cells is the transitory nature of the polynucleotide synthesis in the cells. Studies have shown that non-replicating DNA sequences can be introduced into cells to provide production of the desired polypeptide for periods of up to six months.

[0374] The polynucleotide construct can be delivered to the interstitial space of tissues within the an animal, including of muscle, skin, brain, lung, liver, spleen, bone marrow, thymus, heart, lymph, blood, bone, cartilage, pancreas, kidney, gall bladder, stomach, intestine, testis, ovary, uterus, rectum, nervous system, eye, gland, and connective tissue. Interstitial space of the tissues comprises the intercellular, fluid, mucopolysaccharide matrix among the reticular fibers of organ tissues, elastic fibers in the walls of vessels or chambers, collagen fibers of fibrous tissues, or that same matrix within connective tissue ensheathing muscle cells or in the lacunae of bone. It is similarly the space occupied by the plasma of the circulation and the lymph fluid of the lymphatic channels. Delivery to the interstitial space of muscle tissue is preferred for the reasons discussed below. They may be conveniently delivered by injection into the tissues comprising these cells. They are preferably delivered to and expressed in persistent, non-dividing cells which are differentiated, although delivery and expression may be achieved in non-differentiated or less completely differentiated cells, such as, for example, stem cells of blood or skin fibroblasts. In vivo muscle cells are particularly competent in their ability to take up and express polynucleotides.

[0375] For the naked nucleic acid sequence injection, an effective dosage amount of DNA or RNA will be in the range of from about 0.05 mg/kg body weight to about 50 mg/kg body weight. Preferably the dosage will be from about 0.005 mg/kg to about 20 mg/kg and more preferably from about 0.05 mg/kg to about 5 mg/kg. Of course, as the artisan of ordinary skill will appreciate, this dosage will vary according to the tissue site of injection. The appropriate and effective dosage of nucleic acid sequence can readily be determined by those of ordinary skill in the art and may depend on the condition being treated and the route of administration.

[0376] The preferred route of administration is by the parenteral route of injection into the interstitial space of tissues. However, other parenteral routes may also be used, such as, inhalation of an aerosol formulation particularly for delivery to lungs or bronchial tissues, throat or mucous membranes of the nose. In addition, naked DNA constructs can be delivered to arteries during angioplasty by the catheter used in the procedure.

[0377] The naked polynucleotides are delivered by any method known in the art, including, but not limited to, direct needle injection at the delivery site, intravenous injection, topical administration, catheter infusion, and so-called “gene guns”. These delivery methods are known in the art.

[0378] The constructs may also be delivered with delivery vehicles such as viral sequences, viral particles, liposome formulations, lipofectin, precipitating agents, etc. Such methods of delivery are known in the art.

[0379] In certain embodiments, the polynucleotide constructs are complexed in a liposome preparation. Liposomal preparations for use in the instant invention include cationic (positively charged), anionic (negatively charged) and neutral preparations. However, cationic liposomes are particularly preferred because a tight charge complex can be formed between the cationic liposome and the polyanionic nucleic acid. Cationic liposomes have been shown to mediate intracellular delivery of plasmid DNA (Felgner et al., Proc. Natl. Acad. Sci. USA (1987) 84:7413-7416, which is herein incorporated by reference); mRNA (Malone et al., Proc. Natl. Acad. Sci. USA (1989) 86:6077-6081, which is herein incorporated by reference); and purified transcription factors (Debs et al., J. Biol. Chem. (1990) 265:10189-10192, which is herein incorporated by reference), in functional form.

[0380] Cationic liposomes are readily available. For example, N[1-2,3-dioleyloxy)propyl]-N,N,N-triethylammonium (DOTMA) liposomes are particularly useful and are available under the trademark Lipofectin, from GIBCO BRL, Grand Island, N.Y. (See, also, Felgner et al., Proc. Natl Acad. Sci. USA (1987) 84:7413-7416, which is herein incorporated by reference). Other commercially available liposomes include transfectace (DDAB/DOPE) and DOTAP/DOPE (Boehringer).

[0381] Other cationic liposomes can be prepared from readily available materials using techniques well known in the art. See, e.g. PCT Publication No. WO 90/11092 (which is herein incorporated by reference) for a description of the synthesis of DOTAP (1,2-bis(oleoyloxy)-3-(trimethylammonio)propane) liposomes. Preparation of DOTMA liposomes is explained in the literature, see, e.g., P. Felgner et al., Proc. Natl. Acad. Sci. USA 84:7413-7417, which is herein incorporated by reference. Similar methods can be used to prepare liposomes from other cationic lipid materials.

[0382] Similarly, anionic and neutral liposomes are readily available, such as from Avanti Polar Lipids (Birmingham, Ala.), or can be easily prepared using readily available materials. Such materials include phosphatidyl, choline, cholesterol, phosphatidyl ethanolamine, dioleoylphosphatidyl choline (DOPC), dioleoylphosphatidyl glycerol (DOPG), dioleoylphoshatidyl ethanolamine (DOPE), among others. These materials can also be mixed with the DOTMA and DOTAP starting materials in appropriate ratios. Methods for making liposomes using these materials are well known in the art.

[0383] For example, commercially dioleoylphosphatidyl choline (DOPC), dioleoylphosphatidyl glycerol (DOPG), and dioleoylphosphatidyl ethanolamine (DOPE) can be used in various combinations to make conventional liposomes, with or without the addition of cholesterol. Thus, for example, DOPG/DOPC vesicles can be prepared by drying 50 mg each of DOPG and DOPC under a stream of nitrogen gas into a sonication vial. The sample is placed under a vacuum pump overnight and is hydrated the following day with deionized water. The sample is then sonicated for 2 hours in a capped vial, using a Heat Systems model 350 sonicator equipped with an inverted cup (bath type) probe at the maximum setting while the bath is circulated at 15EC. Alternatively, negatively charged vesicles can be prepared without sonication to produce multilamellar vesicles or by extrusion through nucleopore membranes to produce unilamellar vesicles of discrete size. Other methods are known and available to those of skill in the art.

[0384] The liposomes can comprise multilamellar vesicles (MLVs), small unilamellar vesicles (SUVs), or large unilamellar vesicles (LUVs), with SUVs being preferred. The various liposome-nucleic acid complexes are prepared using methods well known in the art. See, e.g., Straubinger et al., Methods of Immunology (1983), 101:512-527, which is herein incorporated by reference. For example, MLVs containing nucleic acid can be prepared by depositing a thin film of phospholipid on the walls of a glass tube and subsequently hydrating with a solution of the material to be encapsulated. SUVs are prepared by extended sonication of MLVs to produce a homogeneous population of unilamellar liposomes. The material to be entrapped is added to a suspension of preformed MLVs and then sonicated. When using liposomes containing cationic lipids, the dried lipid film is resuspended in an appropriate solution such as sterile water or an isotonic buffer solution such as 10 mM Tris/NaCl, sonicated, and then the preformed liposomes are mixed directly with the DNA. The liposome and DNA form a very stable complex due to binding of the positively charged liposomes to the cationic DNA. SUVs find use with small nucleic acid fragments. LUVs are prepared by a number of methods, well known in the art. Commonly used methods include Ca²⁺-EDTA chelation (Papahadjopoulos et al., Biochim. Biophys. Acta (1975) 394:483; Wilson et al., Cell (1979) 17:77); ether injection (Deamer, D. and Bangham, A., Biochim. Biophys. Acta (1976) 443:629; Ostro et al., Biochem. Biophys. Res. Commun. (1977) 76:836; Fraley et al., Proc. Natl. Acad. Sci. USA (1979) 76:3348); detergent dialysis (Enoch, H. and Strittmatter, P., Proc. Natl. Acad. Sci. USA (1979) 76:145); and reverse-phase evaporation (REV) (Fraley et al., J. Biol. Chem. (1980) 255:10431; Szoka, F. and Papahadjopoulos, D., Proc. Natl. Acad. Sci. USA (1978) 75:145; Schaefer-Ridder et al., Science (1982) 215:166), which are herein incorporated by reference.

[0385] Generally, the ratio of DNA to liposomes will be from about 10:1 to about 1:10. Preferably, the ration will be from about 5:1 to about 1:5. More preferably, the ration will be about 3:1 to about 1:3. Still more preferably, the ratio will be about 1:1.

[0386] U.S. Pat. No. 5,676,954 (which is herein incorporated by reference) reports on the injection of genetic material, complexed with cationic liposomes carriers, into mice. U.S. Pat. Nos. 4,897,355, 4,946,787, 5,049,386, 5,459,127, 5,589,466, 5,693,622, 5,580,859, 5,703,055, and international publication no. WO 94/9469 (which are herein incorporated by reference) provide cationic lipids for use in transfecting DNA into cells and mammals. U.S. Pat. Nos. 5,589,466, 5,693,622, 5,580,859, 5,703,055, and international publication no. WO 94/9469 (which are herein incorporated by reference) provide methods for delivering DNA-cationic lipid complexes to mammals.

[0387] In certain embodiments, cells are engineered, ex vivo or in vivo, using a retroviral particle containing RNA which comprises a sequence encoding a polypeptide of the present invention. Retroviruses from which the retroviral plasmid vectors may be derived include, but are not limited to, Moloney Murine Leukemia Virus, spleen necrosis virus, Rous sarcoma Virus, Harvey Sarcoma Virus, avian leukosis virus, gibbon ape leukemia virus, human immunodeficiency virus, Myeloproliferative Sarcoma Virus, and mammary tumor virus.

[0388] The retroviral plasmid vector is employed to transduce packaging cell lines to form producer cell lines. Examples of packaging cells which may be transfected include, but are not limited to, the PE501, PA317, R-2, R-AM, PA12, T19-14X, VT-19-17-H2, RCRE, RCRIP, GP+E-86, GP+envAm12, and DAN cell lines as described in Miller, Human Gene Therapy 1:5-14 (1990), which is incorporated herein by reference in its entirety. The vector may transduce the packaging cells through any means known in the art. Such means include, but are not limited to, electroporation, the use of liposomes, and CaPO₄ precipitation. In one alternative, the retroviral plasmid vector may be encapsulated into a liposome, or coupled to a lipid, and then administered to a host.

[0389] The producer cell line generates infectious retroviral vector particles which include polynucleotide encoding a polypeptide of the present invention. Such retroviral vector particles then may be employed, to transduce eukaryotic cells, either in vitro or in vivo. The transduced eukaryotic cells will express a polypeptide of the present invention.

[0390] In certain other embodiments, cells are engineered, ex vivo or in vivo, with polynucleotide contained in an adenovirus vector. Adenovirus can be manipulated such that it encodes and expresses a polypeptide of the present invention, and at the same time is inactivated in terms of its ability to replicate in a normal lytic viral life cycle. Adenovirus expression is achieved without integration of the viral DNA into the host cell chromosome, thereby alleviating concerns about insertional mutagenesis. Furthermore, adenoviruses have been used as live enteric vaccines for many years with an excellent safety profile (Schwartz, A. R. et al. (1974) Am. Rev. Respir. Dis.109:233-238). Finally, adenovirus mediated gene transfer has been demonstrated in a number of instances including transfer of alpha-1-antitrypsin and CFTR to the lungs of cotton rats (Rosenfeld, M. A. et al. (1991) Science 252:431-434; Rosenfeld et al., (1992) Cell 68:143-155). Furthermore, extensive studies to attempt to establish adenovirus as a causative agent in human cancer were uniformly negative (Green, M. et al. (1979) Proc. Natl. Acad. Sci. USA 76:6606).

[0391] Suitable adenoviral vectors useful in the present invention are described, for example, in Kozarsky and Wilson, Curr. Opin. Genet. Devel. 3:499-503 (1993); Rosenfeld et al., Cell 68:143-155 (1992); Engelhardt et al., Human Genet. Ther. 4:759-769 (1993); Yang et al., Nature Genet. 7:362-369 (1994); Wilson et al., Nature 365:691-692 (1993); and U.S. Pat. No. 5,652,224, which are herein incorporated by reference. For example, the adenovirus vector Ad2 is useful and can be grown in human 293 cells. These cells contain the E1 region of adenovirus and constitutively express E1a and E1b, which complement the defective adenoviruses by providing the products of the genes deleted from the vector. In addition to Ad2, other varieties of adenovirus (e.g., Ad3, Ad5, and Ad7) are also useful in the present invention.

[0392] Preferably, the adenoviruses used in the present invention are replication deficient. Replication deficient adenoviruses require the aid of a helper virus and/or packaging cell line to form infectious particles. The resulting virus is capable of infecting cells and can express a polynucleotide of interest which is operably linked to a promoter, but cannot replicate in most cells. Replication deficient adenoviruses may be deleted in one or more of all or a portion of the following genes: E1a, E1b, E3, E4, E2a, or L1 through L5.

[0393] In certain other embodiments, the cells are engineered, ex vivo or in vivo, using an adeno-associated virus (AAV). AAVs are naturally occurring defective viruses that require helper viruses to produce infectious particles (Muzyczka, N., Curr. Topics in Microbiol. Immunol. 158:97 (1992)). It is also one of the few viruses that may integrate its DNA into non-dividing cells. Vectors containing as little as 300 base pairs of AAV can be packaged and can integrate, but space for exogenous DNA is limited to about 4.5 kb. Methods for producing and using such AAVs are known in the art. See, for example, U.S. Pat. Nos. 5,139,941, 5,173,414, 5,354,678, 5,436,146, 5,474,935, 5,478,745, and 5,589,377.

[0394] For example, an appropriate AAV vector for use in the present invention will include all the sequences necessary for DNA replication, encapsidation, and host-cell integration. The polynucleotide construct is inserted into the AAV vector using standard cloning methods, such as those found in Sambrook et al., Molecular Cloning: A Laboratory Manual, Cold Spring Harbor Press (1989). The recombinant AAV vector is then transfected into packaging cells which are infected with a helper virus, using any standard technique, including lipofection, electroporation, calcium phosphate precipitation, etc. Appropriate helper viruses include adenoviruses, cytomegaloviruses, vaccinia viruses, or herpes viruses. Once the packaging cells are transfected and infected, they will produce infectious AAV viral particles which contain the polynucleotide construct. These viral particles are then used to transduce eukaryotic cells, either ex vivo or in vivo. The transduced cells will contain the polynucleotide construct integrated into its genome, and will express a polypeptide of the invention.

[0395] Another method of gene therapy involves operably associating heterologous control regions and endogenous polynucleotide sequences (e.g. encoding a polypeptide of the present invention) via homologous recombination (see, e.g., U.S. Pat. No. 5,641,670, issued Jun. 24, 1997; International Publication No. WO 96/29411, published Sep. 26, 1996; International Publication No. WO 94/12650, published Aug. 4, 1994; Koller et al., Proc. Natl. Acad. Sci. USA 86:8932-8935 (1989); and Zijlstra et al., Nature 342:435-438 (1989). This method involves the activation of a gene which is present in the target cells, but which is not normally expressed in the cells, or is expressed at a lower level than desired.

[0396] Polynucleotide constructs are made, using standard techniques known in the art, which contain the promoter with targeting sequences flanking the promoter. Suitable promoters are described herein. The targeting sequence is sufficiently complementary to an endogenous sequence to permit homologous recombination of the promoter-targeting sequence with the endogenous sequence. The targeting sequence will be sufficiently near the 5′ end of the desired endogenous polynucleotide sequence so the promoter will be operably linked to the endogenous sequence upon homologous recombination.

[0397] The promoter and the targeting sequences can be amplified using PCR. Preferably, the amplified promoter contains distinct restriction enzyme sites on the 5′ and 3′ ends. Preferably, the 3′ end of the first targeting sequence contains the same restriction enzyme site as the 5′ end of the amplified promoter and the 5′ end of the second targeting sequence contains the same restriction site as the 3′ end of the amplified promoter. The amplified promoter and targeting sequences are digested and ligated together.

[0398] The promoter-targeting sequence construct is delivered to the cells, either as naked polynucleotide, or in conjunction with transfection-facilitating agents, such as liposomes, viral sequences, viral particles, whole viruses, lipofection, precipitating agents, etc., described in more detail above. The P promoter-targeting sequence can be delivered by any method, included direct needle injection, intravenous injection, topical administration, catheter infusion, particle accelerators, etc. The methods are described in more detail below.

[0399] The promoter-targeting sequence construct is taken up by cells. Homologous recombination between the construct and the endogenous sequence takes place, such that an endogenous sequence is placed under the control of the promoter. The promoter then drives the expression of the endogenous sequence.

[0400] Preferably, the polynucleotide encoding a polypeptide of the present invention contains a secretory signal sequence that facilitates secretion of the protein. Typically, the signal sequence is positioned in the coding region of the polynucleotide to be expressed towards or at the 5′ end of the coding region. The signal sequence may be homologous or heterologous to the polynucleotide of interest and may be homologous or heterologous to the cells to be transfected. Additionally, the signal sequence may be chemically synthesized using methods known in the art.

[0401] Any mode of administration of any of the above-described polynucleotides constructs can be used so long as the mode results in the expression of one or more molecules in an amount sufficient to provide a therapeutic effect. This includes direct needle injection, systemic injection, catheter infusion, biolistic injectors, particle accelerators (i.e., “gene guns”), gelfoam sponge depots, other commercially available depot materials, osmotic pumps (e.g., Alza minipumps), oral or suppositorial solid (tablet or pill) pharmaceutical formulations, and decanting or topical applications during surgery. For example, direct injection of naked calcium phosphate-precipitated plasmid into rat liver and rat spleen or a protein-coated plasmnid into the portal vein has resulted in gene expression of the foreign gene in the rat livers (Kaneda et al., Science 243:375 (1989)).

[0402] A preferred method of local administration is by direct injection. Preferably, a recombinant molecule of the present invention complexed with a delivery vehicle is administered by direct injection into or locally within the area of arteries. Administration of a composition locally within the area of arteries refers to injecting the composition centimeters and preferably, millimeters within arteries.

[0403] Another method of local administration is to contact a polynucleotide construct of the present invention in or around a surgical wound. For example, a patient can undergo surgery and the polynucleotide construct can be coated on the surface of tissue inside the wound or the construct can be injected into areas of tissue inside the wound.

[0404] Therapeutic compositions useful in systemic administration, include recombinant molecules of the present invention complexed to a targeted delivery vehicle of the present invention. Suitable delivery vehicles for use with systemic administration comprise liposomes comprising ligands for targeting the vehicle to a particular site.

[0405] Preferred methods of systemic administration, include intravenous injection, aerosol, oral and percutaneous (topical) delivery. Intravenous injections can be performed using methods standard in the art. Aerosol delivery can also be performed using methods standard in the art (see, for example, Stribling et al., Proc. Natl. Acad. Sci. USA 189:11277-11281, 1992, which is incorporated herein by reference). Oral delivery can be performed by complexing a polynucleotide construct of the present invention to a carrier capable of withstanding degradation by digestive enzymes in the gut of an animal. Examples of such carriers, include plastic capsules or tablets, such as those known in the art. Topical delivery can be performed by mixing a polynucleotide construct of the present invention with a lipophilic reagent (e.g., DMSO) that is capable of passing into the skin.

[0406] Determining an effective amount of substance to be delivered can depend upon a number of factors including, for example, the chemical structure and biological activity of the substance, the age and weight of the animal, the precise condition requiring treatment and its severity, and the route of administration. The frequency of treatments depends upon a number of factors, such as the amount of polynucleotide constructs administered per dose, as well as the health and history of the subject. The precise amount, number of doses, and timing of doses will be determined by the attending physician or veterinarian.

[0407] Therapeutic compositions of the present invention can be administered to any animal, preferably to mammals and birds. Preferred mammals include humans, dogs, cats, mice, rats, rabbits sheep, cattle, horses and pigs, with humans being particularly preferred.

[0408] Biological Activities

[0409] Polynucleotides or polypeptides, or agonists or antagonists of the present invention, can be used in assays to test for one or more biological activities. If these polynucleotides or polypeptides, or agonists or antagonists of the present invention, do exhibit activity in a particular assay, it is likely that these molecules may be involved in the diseases associated with the biological activity. Thus, the polynucleotides and polypeptides, and agonists or antagonists could be used to treat, prevent diagnose and/or prognose the associated disease.

[0410] The prostate cancer antigen polynucleotides and polypeptides of the invention are predicted to have predominant expression in prostate tissues.

[0411] Thus, the prostate cancer antigens of the invention (e.g., polynucleotides of the invention (e.g., nucleotide coding sequence in SEQ ID NO:X, the nucleotide coding sequence of the related cDNA contained in a deposited library or fragments or variants thereof), polypeptides of the invention (e.g., the polypeptide of SEQ ID NO:Y, a polypeptide encoded by SEQ ID NO:X, a polypeptide encoded by the cDNA in the related cDNA clone contained in a deposited library, and/or fragments or variants thereof), and/or an antibody, or fragment thereof, directed to a polypeptide of the invention) may be useful as therapeutic molecules. Each would be useful for diagnosis, detection, treatment and/or prevention of diseases or disorders of the prostate, including but not limited to prostate cancers such as adenocarcinoma, transitional cell carcinomas, ductal carcinomas, and squamous cell carcinomas.

[0412] Particularly, the prostate cancer antigens may be a useful therapeutic for prostate cancer. Treatment, diagnosis, detection, and/or prevention of prostate disorders could be carried out using a prostate cancer antigen or soluble form of a prostate cancer antigen, a prostate cancer antigen ligand, gene therapy, or ex vivo applications. Moreover, inhibitors of a prostate cancer antigen, either blocking antibodies or mutant forms, could modulate the expression of the prostate cancer antigen. These inhibitors may be useful to treat, diagnose, detect, and/or prevent diseases associated with the misregulation of a prostate cancer antigen.

[0413] In one embodiment, the invention provides a method for the specific delivery of compositions of the invention to cells (e.g., normal or diseased prostate cells) by administering polypeptides of the invention (e.g., prostate cancer antigen polypeptides or anti-prostate cancer antigen antibodies) that are associated with heterologous polypeptides or nucleic acids. In one example, the invention provides a method for delivering a therapeutic protein into the targeted cell (e.g., an aberrant prostate cell or prostate cancer cell). In another example, the invention provides a method for delivering a single stranded nucleic acid (e.g., antisense or ribozymes) or double stranded nucleic acid (e.g., DNA that can integrate into the cell's genome or replicate episomally and that can be transcribed) into the targeted cell.

[0414] In another embodiment, the invention provides a method for the specific destruction of cells (e.g., the destruction of aberrant prostate cells, including, but not limited to, prostate tumor cells) by administering polypeptides of the invention (e.g., prostate cancer antigen polypeptides or fragments thereof, or anti-prostate cancer antigen antibodies) in association with toxins or cytotoxic prodrugs.

[0415] By “toxin” is meant compounds that bind and activate endogenous cytotoxic effector systems, radioisotopes, holotoxins, modified toxins, catalytic subunits of toxins, cytotoxins (cytotoxic agents), or any molecules or enzymes not normally present in or on the surface of a cell that under defined conditions cause the cell's death. Toxins that may be used according to the methods of the invention include, but are not limited to, radioisotopes known in the art, compounds such as, for example, antibodies (or complement fixing containing portions thereof) that bind an inherent or induced endogenous cytotoxic effector system, thymidine kinase, endonuclease, RNAse, alpha toxin, ricin, abrin, Pseudomonas exotoxin A, diphtheria toxin, saporin, momordin, gelonin, pokeweed antiviral protein, alpha-sarcin and cholera toxin. “Toxin” also includes a cytostatic or cytocidal agent, a therapeutic agent or a radioactive metal ion, e.g., alpha-emitters such as, for example, ²¹³Bi, or other radioisotopes such as, for example, ¹⁰³Pd, ¹³³Xe, ¹³¹I, ⁶⁸Ge, ⁵⁷Co, ⁶⁵Zn, ⁸⁵Sr, ³²P, ³⁵S, ⁹⁰Y, ¹⁵³Sm, ¹⁵³Gd, ¹⁶⁹Yb, ⁵¹Cr, ⁵⁴Mn, ⁷⁵Se, ¹¹³Sn, ⁹⁰Yttrium, ¹¹⁷Tin, ¹⁸⁶Rhenium, ¹⁶⁶Holmium, and ¹⁸⁸Rhenium; luminescent labels, such as luminol; and fluorescent labels, such as fluorescein and rhodamine, and biotin.

[0416] Techniques known in the art may be applied to label antibodies of the invention. Such techniques include, but are not limited to, the use of bifunctional conjugating agents (see e.g., U.S. Pat. Nos. 5,756,065; 5,714,631; 5,696,239; 5,652,361; 5,505,931; 5,489,425; 5,435,990; 5,428,139; 5,342,604; 5,274,119; 4,994,560; and 5,808,003; the contents of each of which are hereby incorporated by reference in its entirety). A cytotoxin or cytotoxic agent includes any agent that is detrimental to cells. Examples include paclitaxol, cytochalasin B, gramicidin D, ethidium bromide, emetine, mitomycin, etoposide, tenoposide, vincristine, vinblastine, colchicin, doxorubicin, daunorubicin, dihydroxy anthracin dione, mitoxantrone, mithramycin, actinomycin D, 1-dehydrotestosterone, glucocorticoids, procaine, tetracaine, lidocaine, propranolol, and puromycin and analogs or homologs thereof. Therapeutic agents include, but are not limited to, antimetabolites (e.g., methotrexate, 6-mercaptopurine, 6-thioguanine, cytarabine, 5-fluorouracil decarbazine), alkylating agents (e.g., mechlorethamine, thioepa chlorambucil, melphalan, carmustine (BSNU) and lomustine (CCNU), cyclothosphamide, busulfan, dibromomannitol, streptozotocin, mitomycin C, and cis-dichlorodiamine platinum (II) (DDP) cisplatin), anthracyclines (e.g., daunorubicin (formerly daunomycin) and doxorubicin), antibiotics (e.g., dactinomycin (formerly actinomycin), bleomycin, mithramycin, and anthramycin (AMC)), and anti-mitotic agents (e.g., vincristine and vinblastine).

[0417] By “cytotoxic prodrug” is meant a non-toxic compound that is converted by an enzyme, normally present in the cell, into a cytotoxic compound. Cytotoxic prodrugs that may be used according to the methods of the invention include, but are not limited to, glutamyl derivatives of benzoic acid mustard alkylating agent, phosphate derivatives of etoposide or mitomycin C, cytosine arabinoside, daunorubisin, and phenoxyacetamide derivatives of doxorubicin.

[0418] It will be appreciated that conditions caused by a decrease in the standard or normal level of a prostate cancer antigen activity in an individual, particularly disorders of the prostate, can be treated by administration of a prostate cancer antigen polypeptide (e.g., such as, for example, the complete prostate cancer antigen polypeptide, the soluble form of the extracellular domain of a prostate cancer antigen polypeptide, or cells expressing the complete protein) or agonist. Thus, the invention also provides a method of treatment of an individual in need of an increased level of prostate cancer antigen activity comprising administering to such an individual a pharmaceutical composition comprising an amount of an isolated prostate cancer antigen polypeptide of the invention, or agonist thereof (e.g., an agonistic anti-prostate cancer antigen antibody), effective to increase the prostate cancer antigen activity level in such an individual.

[0419] It will also be appreciated that conditions caused by a increase in the standard or normal level of prostate cancer antigen activity in an individual, particularly disorders of the prostate, can be treated by administration of prostate cancer antigen polypeptides (e.g., such as, for example, the complete prostate cancer antigen polypeptide, the soluble form of the extracellular domain of a prostate cancer antigen polypeptide, or cells expressing the complete protein) or antagonist (e.g., an antagonistic prostate cancer antigen antibody). Thus, the invention also provides a method of treatment of an individual in need of an decreased level of prostate cancer antigen activity comprising administering to such an individual a pharmaceutical composition comprising an amount of an isolated prostate cancer antigen polypeptide of the invention, or antagonist thereof (e.g., an antagonistic anti-prostate cancer antigen antibody), effective to decrease the prostate cancer antigen activity level in such an individual.

[0420] More generally, polynucleotides, translation products and antibodies corresponding to this gene may be useful for the diagnosis, prognosis, prevention, and/or treatment of diseases and/or disorders associated with the following systems.

[0421] Reproductive System Disorders

[0422] The polynucleotides or polypeptides, or agonists or antagonists of the invention may be used for the diagnosis, treatment, or prevention of diseases and/or disorders of the reproductive system. Reproductive system disorders that can be treated by the compositions of the invention, include, but are not limited to, reproductive system injuries, infections, neoplastic disorders, congenital defects, and diseases or disorders which result in infertility, complications with pregnancy, labor, or parturition, and postpartum difficulties.

[0423] Reproductive system disorders and/or diseases include diseases and/or disorders of the testes, including, but not limited to, testicular atrophy, testicular feminization, cryptorchism (unilateral and bilateral), anorchia, ectopic testis, epididymitis and orchitis (typically resulting from infections such as, for example, gonorrhea, mumps, tuberculosis, and syphilis), testicular torsion, vasitis nodosa, germ cell tumors (e.g., semninomas, embryonal cell carcinomas, teratocarcinomas, choriocarcinomas, yolk sac tumors, and teratomas), stromal tumors (e.g., Leydig cell tumors), hydrocele, hematocele, varicocele, spermatocele, inguinal hernia, and disorders of sperm production (e.g., immotile cilia syndrome, aspermia, asthenozoospermia, azoospermia, oligospermia, and teratozoospermia).

[0424] Reproductive system disorders also include, but are not limited to, disorders of the prostate gland, such as acute non-bacterial prostatitis, chronic non-bacterial prostatitis, acute bacterial prostatitis, chronic bacterial prostatitis, prostatodystonia, prostatosis, granulomatous prostatitis, malacoplakia, benign prostatic hypertrophy or hyperplasia, and prostate neoplastic disorders, including adenocarcinomas, transitional cell carcinomas, ductal carcinomas, and squamous cell carcinomas.

[0425] Additionally, the compositions of the invention may be useful in the diagnosis, treatment, and/or prevention of disorders or diseases of the penis and urethra, including, but not limited to, inflammatory disorders, such as balanoposthitis, balanitis xerotica obliterans, phimosis, paraphimosis, syphilis, herpes simplex virus, gonorrhea, non-gonococcal urethritis, chlamydia, mycoplasma, trichomonas, HIV, AIDS, Reiter's syndrome, condyloma acuminatum, condyloma latum, and pearly penile papules; urethral abnormalities, such as hypospadias, epispadias, and phimosis; premalignant lesions, including Erythroplasia of Queyrat, Bowen's disease, Bowenoid paplosis, giant condyloma of Buscke-Lowenstein, and varrucous carcinoma; penile cancers, including squamous cell carcinomas, carcinoma in situ, verrucous carcinoma, and disseminated penile carcinoma; urethral neoplastic disorders, including penile urethral carcinoma, bulbomembranous urethral carcinoma, and prostatic urethral carcinoma; and erectile disorders, such as priapism, Peyronie's disease, erectile dysfunction, and impotence.

[0426] Moreover, diseases and/or disorders of the vas deferens include, but are not limited to, vasculititis and CBAVD (congenital bilateral absence of the vas deferens); additionally, the polynucleotides, polypeptides, and agonists or antagonists of the present invention may be used in the diagnosis, treatment, and/or prevention of diseases and/or disorders of the seminal vesicles, including but not limited to, hydatid disease, congenital chloride diarrhea, and polycystic kidney disease.

[0427] Other disorders and/or diseases of the male reproductive system that may be diagnosed, treated, and/or prevented with the compositions of the invention include, but are not limited to, Klinefelter's syndrome, Young's syndrome, premature ejaculation, diabetes mellitus, cystic fibrosis, Kartagener's syndrome, high fever, multiple sclerosis, and gynecomastia.

[0428] Further, the polynucleotides, polypeptides, and agonists or antagonists of the present invention may be used in the diagnosis, treatment, and/or prevention of diseases and/or disorders of the vagina and vulva, including, but not limited to, bacterial vaginosis, candida vaginitis, herpes simplex virus, chancroid, granuloma inguinale, lymphogranuloma venereum, scabies, human papillomavirus, vaginal trauma, vulvar trauma, adenosis, chlamydia vaginitis, gonorrhea, trichomonas vaginitis, condyloma acuminatum, syphilis, molluscum contagiosum, atrophic vaginitis, Paget's disease, lichen sclerosus, lichen planus, vulvodynia, toxic shock syndrome, vaginismus, vulvovaginitis, vulvar vestibulitis, and neoplastic disorders, such as squamous cell hyperplasia, clear cell carcinoma, basal cell carcinoma, melanomas, cancer of Bartholin's gland, and vulvar intraepithelial neoplasia.

[0429] Disorders and/or diseases of the uterus that may be diagnosed, treated, and/or prevented with the compositions of the invention include, but are not limited to, dysmenorrhea, retroverted uterus, endometriosis, fibroids, adenomyosis, anovulatory bleeding, amenorrhea, Cushing's syndrome, hydatidiform moles, Asherman's syndrome, premature menopause, precocious puberty, uterine polyps, dysfunctional uterine bleeding (e.g., due to aberrant hormonal signals), and neoplastic disorders, such as adenocarcinomas, keiomyosarcomas, and sarcomas. Additionally, the polypeptides, polynucleotides, or agonists or antagonists of the invention may be useful as a marker or detector of, as well as in the diagnosis, treatment, and/or prevention of congenital uterine abnormalities, such as bicomuate uterus, septate uterus, simple unicomuate uterus, unicomuate uterus with a noncavitary rudimentary horn, unicomuate uterus with a non-communicating cavitary rudimentary hom, unicomuate uterus with a communicating cavitary horn, arcuate uterus, uterine didelfus, and T-shaped uterus.

[0430] Ovarian diseases and/or disorders that may be diagnosed, treated, and/or prevented with the compositions of the invention include, but are not limited to, anovulation, polycystic ovary syndrome (Stein-Leventhal syndrome), ovarian cysts, ovarian hypofunction, ovarian insensitivity to gonadotropins, ovarian overproduction of androgens, right ovarian vein syndrome, amenorrhea, hirutism, and ovarian cancer (including, but not limited to, primary and secondary cancerous growth, Sertoli-Leydig tumors, endometriod carcinoma of the ovary, ovarian papillary serous adenocarcinoma, ovarian mucinous adenocarcinoma, and Ovarian Krukenberg tumors).

[0431] Cervical diseases and/or disorders that may be diagnosed, treated, and/or prevented with the compositions of the invention include, but are not limited to, cervicitis, chronic cervicitis, mucopurulent cervicitis, cervical dysplasia, cervical polyps, Nabothian cysts, cervical erosion, cervical incompetence, and cervical neoplasms (including, for example, cervical carcinoma, squamous metaplasia, squamous cell carcinoma, adenosquamous cell neoplasia, and columnar cell neoplasia).

[0432] Additionally, diseases and/or disorders of the reproductive system that may be diagnosed, treated, and/or prevented with the compositions of the invention include, but are not limited to, disorders and/or diseases of pregnancy, including miscarriage and stillbirth, such as early abortion, late abortion, spontaneous abortion, induced abortion, therapeutic abortion, threatened abortion, missed abortion, incomplete abortion, complete abortion, habitual abortion, missed abortion, and septic abortion; ectopic pregnancy, anemia, Rh incompatibility, vaginal bleeding during pregnancy, gestational diabetes, intrauterine growth retardation, polyhydramnios, HELLP syndrome, abruptio placentae, placenta previa, hyperemesis, preeclampsia, eclampsia, herpes gestationis, and urticaria of pregnancy. Additionally, the polynucleotides, polypeptides, and agonists or antagonists of the present invention may be used in the diagnosis, treatment, and/or prevention of diseases that can complicate pregnancy, including heart disease, heart failure, rheumatic heart disease, congenital heart disease, mitral valve prolapse, high blood pressure, anemia, kidney disease, infectious disease (e.g., rubella, cytomegalovirus, toxoplasmosis, infectious hepatitis, chlamydia, HIV, AIDS, and genital herpes), diabetes mellitus, Graves' disease, thyroiditis, hypothyroidism, Hashimoto's thyroiditis, chronic active hepatitis, cirrhosis of the liver, primary biliary cirrhosis, asthma, systemic lupus eryematosis, rheumatoid arthritis, myasthenia gravis, idiopathic thrombocytopenic purpura, appendicitis, ovarian cysts, gallbladder disorders,and obstruction of the intestine.

[0433] Complications associated with labor and parturition that may be diagnosed, treated, and/or prevented with the compositions of the invention include, but are not limited to, premature rupture of the membranes, pre-term labor, post-term pregnancy, postmaturity, labor that progresses too slowly, fetal distress (e.g., abnormal heart rate (fetal or maternal), breathing problems, and abnormal fetal position), shoulder dystocia, prolapsed umbilical cord, amniotic fluid embolism, and aberrant uterine bleeding.

[0434] Further, diseases and/or disorders of the postdelivery period, that may be diagnosed, treated, and/or prevented with the compositions of the invention, include, but are not limited to, endometritis, myometritis, parametritis, peritonitis, pelvic thrombophlebitis, pulmonary embolism, endotoxemia, pyelonephritis, saphenous thrombophlebitis, mastitis, cystitis, postpartum hemorrhage, and inverted uterus.

[0435] Other disorders and/or diseases of the female reproductive system that may be diagnosed, treated, and/or prevented by the polynucleotides, polypeptides, and agonists or antagonists of the present invention include, but are not limited to, Turner's syndrome, pseudohermaphroditism, premenstrual syndrome, pelvic inflammatory disease, pelvic congestion (vascular engorgement), frigidity, anorgasmia, dyspareunia, ruptured fallopian tube, and Mittelschmerz.

[0436] Immune Activity

[0437] Polynucleotides, polypeptides, antibodies, and/or agonists or antagonists of the present invention may be useful in treating, preventing, diagnosing and/or prognosing diseases, disorders, and/or conditions of the immune system, by, for example, activating or inhibiting the proliferation, differentiation, or mobilization (chemotaxis) of immune cells. Immune cells develop through a process called hematopoiesis, producing myeloid (platelets, red blood cells, neutrophils, and macrophages) and lymphoid (B and T lymphocytes) cells from pluripotent stem cells. The etiology of these immune diseases, disorders, and/or conditions may be genetic, somatic, such as cancer and some autoimmune diseases, acquired (e.g., by chemotherapy or toxins), or infectious. Moreover, polynucleotides, polypeptides, antibodies, and/or agonists or antagonists of the present invention can be used as a marker or detector of a particular immune system disease or disorder.

[0438] Polynucleotides, polypeptides, antibodies, and/or agonists or antagonists of the present invention may be useful in treating, preventing, diagnosing, and/or prognosing immunodeficiencies, including both congenital and acquired immunodeficiencies. Examples of B cell immunodeficiencies in which immunoglobulin levels B cell function and/or B cell numbers are decreased include: X-linked agammaglobulinernia (Bruton's disease), X-linked infantile agammaglobulinemia, X-linked immunodeficiency with hyper IgM, non X-linked immunodeficiency with hyper IgM, X-linked lymphoproliferative syndrome (XLP), agammaglobulinemia including congenital and acquired agammaglobulinemia, adult onset agammaglobulinemia, late-onset agammaglobulinemia, dysgammaglobulinemia, hypogammaglobulinemia, unspecified hypogammaglobulinemia, recessive agammaglobulinemia (Swiss type), Selective IgM deficiency, selective IgA deficiency, selective IgG subclass deficiencies, IgG subclass deficiency (with or without IgA deficiency), Ig deficiency with increased IgM, IgG and IgA deficiency with increased IgM, antibody deficiency with normal or elevated Igs, Ig heavy chain deletions, kappa chain deficiency, B cell lymphoproliferative disorder (BLPD), common variable immunodeficiency (CVID), common variable immunodeficiency (CVI) (acquired), and transient hypogammaglobulinemia of infancy.

[0439] In specific embodiments, ataxia-telangiectasia or conditions associated with ataxia-telangiectasia are treated, prevented, diagnosed, and/or prognosing using the polypeptides or polynucleotides of the invention, and/or agonists or antagonists thereof.

[0440] Examples of congenital immunodeficiencies in which T cell and/or B cell function and/or number is decreased include, but are not limited to: DiGeorge anomaly, severe combined immunodeficiencies (SCID) (including, but not limited to, X-linked SCID, autosomal recessive SCID, adenosine deaminase deficiency, purine nucleoside phosphorylase (PNP) deficiency, Class II MHC deficiency (Bare lymphocyte syndrome), Wiskott-Aldrich syndrome, and ataxia telangiectasia), thymic hypoplasia, third and fourth pharyngeal pouch syndrome, 22q11.2 deletion, chronic mucocutaneous candidiasis, natural killer cell deficiency (NK), idiopathic CD4+ T-lymphocytopenia, immunodeficiency with predominant T cell defect (unspecified), and unspecified immunodeficiency of cell mediated immunity.

[0441] In specific embodiments, DiGeorge anomaly or conditions associated with DiGeorge anomaly are treated, prevented, diagnosed, and/or prognosed using polypeptides or polynucleotides of the invention, or antagonists or agonists thereof.

[0442] Other immunodeficiencies that may be treated, prevented, diagnosed, and/or prognosed using polypeptides or polynucleotides of the invention, and/or agonists or antagonists thereof, include, but are not limited to, chronic granulomatous disease, Chédiak-Higashi syndrome, myeloperoxidase deficiency, leukocyte glucose-6-phosphate dehydrogenase deficiency, X-linked lymphoproliferative syndrome (XLP), leukocyte adhesion deficiency, complement component deficiencies (including C1, C2, C3, C4, C5, C6, C7, C8 and/or C9 deficiencies), reticular dysgenesis, thymic alymphoplasia-aplasia, immunodeficiency with thymoma, severe congenital leukopenia, dysplasia with immunodeficiency, neonatal neutropenia, short limbed dwarfism, and Nezelof syndrome-combined immunodeficiency with Igs.

[0443] In a preferred embodiment, the immunodeficiencies and/or conditions associated with the immunodeficiencies recited above are treated, prevented, diagnosed and/or prognosed using polynucleotides, polypeptides, antibodies, and/or agonists or antagonists of the present invention.

[0444] In a preferred embodiment polynucleotides, polypeptides, antibodies, and/or agonists or antagonists of the present invention could be used as an agent to boost immunoresponsiveness among immunodeficient individuals. In specific embodiments, polynucleotides, polypeptides, antibodies, and/or agonists or antagonists of the present invention could be used as an agent to boost immunoresponsiveness among B cell and/or T cell immunodeficient individuals.

[0445] The polynucleotides, polypeptides, antibodies, and/or agonists or antagonists of the present invention may be useful in treating, preventing, diagnosing and/or prognosing autoimmune disorders. Many autoimmune disorders result from inappropriate recognition of self as foreign material by immune cells. This inappropriate recognition results in an immune response leading to the destruction of the host tissue. Therefore, the administration of polynucleotides and polypeptides of the invention that can inhibit an immune response, particularly the proliferation, differentiation, or chemotaxis of T-cells, may be an effective therapy in preventing autoimmune disorders.

[0446] Autoimmune diseases or disorders that may be treated, prevented, diagnosed and/or prognosed by polynucleotides, polypeptides, antibodies, and/or agonists or antagonists of the present invention include, but are not limited to, one or more of the following: systemic lupus erythematosus, rheumatoid arthritis, ankylosing spondylitis, multiple sclerosis, autoimmune thyroiditis, Hashimoto's thyroiditis, autoimmune hemolytic anemia, hemolytic anemia, thrombocytopenia, autoimmune thrombocytopenia purpura, autoimmune neonatal thrombocytopenia, idiopathic thrombocytopenia purpura, purpura (e.g., Henloch-Scoenlein purpura), autoimmunocytopenia, Goodpasture's syndrome, Pemphigus vulgaris, myasthenia gravis, Grave's disease (hyperthyroidism), and insulin-resistant diabetes mellitus.

[0447] Additional disorders that are likely to have an autoimmune component that may be treated, prevented, and/or diagnosed with the compositions of the invention include, but are not limited to, type II collagen-induced arthritis, antiphospholipid syndrome, dermatitis, allergic encephalomyelitis, myocarditis, relapsing polychondritis, rheumatic heart disease, neuritis, uveitis ophthalmia, polyendocrinopathies, Reiter's Disease, Stiff-Man Syndrome, autoimmune pulmonary inflammation, autism, Guillain-Barre Syndrome, insulin dependent diabetes mellitus, and autoimmune inflammatory eye disorders.

[0448] Additional disorders that are likely to have an autoimmune component that may be treated, prevented, diagnosed and/or prognosed with the compositions of the invention include, but are not limited to, scleroderma with anti-collagen antibodies (often characterized, e.g., by nucleolar and other nuclear antibodies), mixed connective tissue disease (often characterized, e.g., by antibodies to extractable nuclear antigens (e.g., ribonucleoprotein)), polymyositis (often characterized, e.g., by nonhistone ANA), pernicious anemia (often characterized, e.g., by antiparietal cell, microsomes, and intrinsic factor antibodies), idiopathic Addison's disease (often characterized, e.g., by humoral and cell-mediated adrenal cytotoxicity, infertility (often characterized, e.g., by antispermatozoal antibodies), glomerulonephritis (often characterized, e.g., by glomerular basement membrane antibodies or immune complexes), bullous pemphigoid (often characterized, e.g., by IgG and complement in basement membrane), Siogren's syndrome (often characterized, e.g., by multiple tissue antibodies, and/or a specific nonhistone ANA (SS-B)), diabetes mellitus (often characterized, e.g., by cell-mediated and humoral islet cell antibodies), and adrenergic drug resistance (including adrenergic drug resistance with asthma or cystic fibrosis) (often characterized, e.g., by beta-adrenergic receptor antibodies).

[0449] Additional disorders that may have an autoimmune component that may be treated, prevented, diagnosed and/or prognosed with the compositions of the invention include, but are not limited to, chronic active hepatitis (often characterized, e.g., by smooth muscle antibodies), primary biliary cirrhosis (often characterized, e.g., by mitochondria antibodies), other endocrine gland failure (often characterized, e.g., by specific tissue antibodies in some cases), vitiligo (often characterized, e.g., by melanocyte antibodies), vasculitis (often characterized, e.g., by Ig and complement in vessel walls and/or low serum complement), post-MI (often characterized, e.g., by myocardial antibodies), cardiotomy syndrome (often characterized, e.g., by myocardial antibodies), urticaria (often characterized, e.g., by IgG and IgM antibodies to IgE), atopic dermatitis (often characterized, e.g., by IgG and IgM antibodies to IgE), asthma (often characterized, e.g., by IgG and IgM antibodies to IgE), and many other inflammatory, granulomatous, degenerative, and atrophic disorders.

[0450] In a preferred embodiment, the autoimmune diseases and disorders and/or conditions associated with the diseases and disorders recited above are treated, prevented, diagnosed and/or prognosed using for example, antagonists or agonists, polypeptides or polynucleotides, or antibodies of the present invention. In a specific preferred embodiment, rheumatoid arthritis is treated, prevented, and/or diagnosed using polynucleotides, polypeptides, antibodies, and/or agonists or antagonists of the present invention.

[0451] In another specific preferred embodiment, systemic lupus erythematosus is treated, prevented, and/or diagnosed using polynucleotides, polypeptides, antibodies, and/or agonists or antagonists of the present invention. In another specific preferred embodiment, idiopathic thrombocytopenia purpura is treated, prevented, and/or diagnosed using polynucleotides, polypeptides, antibodies, and/or agonists or antagonists of the present invention.

[0452] In another specific preferred embodiment IgA nephropathy is treated, prevented, and/or diagnosed using polynucleotides, polypeptides, antibodies, and/or agonists or antagonists of the present invention.

[0453] In a preferred embodiment, the autoimmune diseases and disorders and/or conditions associated with the diseases and disorders recited above are treated, prevented, diagnosed and/or prognosed using polynucleotides, polypeptides, antibodies, and/or agonists or antagonists of the present invention.

[0454] In preferred embodiments, polypeptides, antibodies, polynucleotides and/or agonists or antagonists of the present invention are used as a immunosuppressive agent(s).

[0455] Polynucleotides, polypeptides, antibodies, and/or agonists or antagonists of the present invention may be useful in treating, preventing, prognosing, and/or diagnosing diseases, disorders, and/or conditions of hematopoietic cells. Polynucleotides, polypeptides, antibodies, and/or agonists or antagonists of the present invention could be used to increase differentiation and proliferation of hematopoietic cells, including the pluripotent stem cells, in an effort to treat or prevent those diseases, disorders, and/or conditions associated with a decrease in certain (or many) types hematopoietic cells, including but not limited to, leukopenia, neutropenia, anemia, and thrombocytopenia. Alternatively, Polynucleotides, polypeptides, antibodies, and/or agonists or antagonists of the present invention could be used to increase differentiation and proliferation of hematopoietic cells, including the pluripotent stem cells, in an effort to treat or prevent those diseases, disorders, and/or conditions associated with an increase in certain (or many) types of hematopoietic cells, including but not limited to, histiocytosis.

[0456] Allergic reactions and conditions, such as asthma (particularly allergic asthma) or other respiratory problems, may also be treated, prevented, diagnosed and/or prognosed using polypeptides, antibodies, or polynucleotides of the invention, and/or agonists or antagonists thereof. Moreover, these molecules can be used to treat, prevent, prognose, and/or diagnose anaphylaxis, hypersensitivity to an antigenic molecule, or blood group incompatibility.

[0457] Additionally, polypeptides or polynucleotides of the invention, and/or agonists or antagonists thereof, may be used to treat, prevent, diagnose and/or prognose IgE-mediated allergic reactions. Such allergic reactions include, but are not limited to, asthma, rhinitis, and eczema. In specific embodiments, polynucleotides, polypeptides, antibodies, and/or agonists or antagonists of the present invention may be used to modulate IgE concentrations in vitro or in vivo.

[0458] Moreover, polynucleotides, polypeptides, antibodies, and/or agonists or antagonists of the present invention have uses in the diagnosis, prognosis, prevention, and/or treatment of inflammatory conditions. For example, since polypeptides, antibodies, or polynucleotides of the invention, and/or agonists or antagonists of the invention may inhibit the activation, proliferation and/or differentiation of cells involved in an inflammatory response, these molecules can be used to prevent and/or treat chronic and acute inflammatory conditions. Such inflammatory conditions include, but are not limited to, for example, inflammation associated with infection (e.g., septic shock, sepsis, or systemic inflammatory response syndrome), ischemia-reperfusion injury, endotoxin lethality, complement-mediated hyperacute rejection, nephritis, cytokine or chemokine induced lung injury, inflammatory bowel disease, Crohn's disease, over production of cytokines (e.g., TNF or IL-1.), respiratory disorders (e.g., asthma and allergy); gastrointestinal disorders (e.g., inflammatory bowel disease); cancers (e.g., gastric, ovarian, lung, bladder, liver, and breast); CNS disorders (e.g., multiple sclerosis; ischemic brain injury and/or stroke, traumatic brain injury, neurodegenerative disorders (e.g., Parkinson's disease and Alzheimer's disease); AIDS-related dementia; and prion disease); cardiovascular disorders (e.g., atherosclerosis, myocarditis, cardiovascular disease, and cardiopulmonary bypass complications); as well as many additional diseases, conditions, and disorders that are characterized by inflammation (e.g., hepatitis, rheumatoid arthritis, gout, trauma, pancreatitis, sarcoidosis, dermatitis, renal ischemia-reperfusion injury, Grave's disease, systemic lupus erythematosus, diabetes mellitus, and allogenic transplant rejection).

[0459] Because inflammation is a fundamental defense mechanism, inflammatory disorders can effect virtually any tissue of the body. Accordingly, polynucleotides, polypeptides, and antibodies of the invention, as well as agonists or antagonists thereof, have uses in the treatment of tissue-specific inflammatory disorders, including, but not limited to, adrenalitis, alveolitis, angiocholecystitis, appendicitis, balanitis, blepharitis, bronchitis, bursitis, carditis, cellulitis, cervicitis, cholecystitis, chorditis, cochlitis, colitis, conjunctivitis, cystitis, dermatitis, diverticulitis, encephalitis, endocarditis, esophagitis, eustachitis, fibrositis, folliculitis, gastritis, gastroenteritis, gingivitis, glossitis, hepatosplenitis, keratitis, labyrinthitis, laryngitis, lymphangitis, mastitis, media otitis, meningitis, metritis, mucitis, myocarditis, myosititis, myringitis, nephritis, neuritis, orchitis, osteochondritis, otitis, pericarditis, peritendonitis, peritonitis, pharyngitis, phlebitis, poliomyelitis, prostatitis, pulpitis, retinitis, rhinitis, salpingitis, scleritis, sclerochoroiditis, scrotitis, sinusitis, spondylitis, steatitis, stomatitis, synovitis, syringitis, tendonitis, tonsillitis, urethritis, and vaginitis.

[0460] In specific embodiments, polypeptides, antibodies, or polynucleotides of the invention, and/or agonists or antagonists thereof, are useful to diagnose, prognose, prevent, and/or treat organ transplant rejections and graft-versus-host disease. Organ rejection occurs by host immune cell destruction of the transplanted tissue through an immune response. Similarly, an immune response is also involved in GVHD, but, in this case, the foreign transplanted immune cells destroy the host tissues. Polypeptides, antibodies, or polynucleotides of the invention, and/or agonists or antagonists thereof, that inhibit an immune response, particularly the activation, proliferation, differentiation, or chemotaxis of T-cells, may be an effective therapy in preventing organ rejection or GVHD. In specific embodiments, polypeptides, antibodies, or polynucleotides of the invention, and/or agonists or antagonists thereof, that inhibit an immune response, particularly the activation, proliferation, differentiation, or chemotaxis of T-cells, may be an effective therapy in preventing experimental allergic and hyperacute xenograft rejection.

[0461] In other embodiments, polypeptides, antibodies, or polynucleotides of the invention, and/or agonists or antagonists thereof, are useful to diagnose, prognose, prevent, and/or treat immune complex diseases, including, but not limited to, serum sickness, post streptococcal glomerulonephritis, polyarteritis nodosa, and immune complex-induced vasculitis.

[0462] Polypeptides, antibodies, polynucleotides and/or agonists or antagonists of the invention can be used to treat, detect, and/or prevent infectious agents. For example, by increasing the immune response, particularly increasing the proliferation activation and/or differentiation of B and/or T cells, infectious diseases may be treated, detected, and/or prevented. The immune response may be increased by either enhancing an existing immune response, or by initiating a new immune response. Alternatively, polynucleotides, polypeptides, antibodies, and/or agonists or antagonists of the present invention may also directly inhibit the infectious agent (refer to section of application listing infectious agents, etc), without necessarily eliciting an immune response.

[0463] In another embodiment, polypeptides, antibodies, polynucleotides and/or agonists or antagonists of the present invention are used as a vaccine adjuvant that enhances immune responsiveness to an antigen. In a specific embodiment, polypeptides, antibodies, polynucleotides and/or agonists or antagonists of the present invention are used as an adjuvant to enhance tumor-specific immune responses.

[0464] In another specific embodiment, polypeptides, antibodies, polynucleotides and/or agonists or antagonists of the present invention are used as an adjuvant to enhance anti-viral immune responses. Anti-viral immune responses that may be enhanced using the compositions of the invention as an adjuvant, include virus and virus associated diseases or symptoms described herein or otherwise known in the art. In specific embodiments, the compositions of the invention are used as an adjuvant to enhance an immune response to a virus, disease, or symptom selected from the group consisting of: AIDS, meningitis, Dengue, EBV, and hepatitis (e.g., hepatitis B). In another specific embodiment, the compositions of the invention are used as an adjuvant to enhance an immune response to a virus, disease, or symptom selected from the group consisting of: HIV/AIDS, respiratory syncytial virus, Dengue, rotavirus, Japanese B encephalitis, influenza A and B, parainfluenza, measles, cytomegalovirus, rabies, Junin, Chikungunya, Rift Valley Fever, herpes simplex, and yellow fever.

[0465] In another specific embodiment, polypeptides, antibodies, polynucleotides and/or agonists or antagonists of the present invention are used as an adjuvant to enhance antibacterial or anti-fungal immune responses. Anti-bacterial or anti-fungal immune responses that may be enhanced using the compositions of the invention as an adjuvant, include bacteria or fungus and bacteria or fungus associated diseases or symptoms described herein or otherwise known in the art. In specific embodiments, the compositions of the invention are used as an adjuvant to enhance an immune response to a bacteria or fungus, disease, or symptom selected from the group consisting of: tetanus, Diphtheria, botulism, and meningitis type B.

[0466] In another specific embodiment, the compositions of the invention are used as an adjuvant to enhance an immune response to a bacteria or fungus, disease, or symptom selected from the group consisting of: Vibrio cholerae, Mycobacterium leprae, Salmonella typhi, Salmonella paratyphi, Meisseria meningitidis, Streptococcus pneumoniae, Group B streptococcus, Shigella spp., Enterotoxigenic Escherichia coli, Enterohemorrhagic E. coli, and Borrelia burgdorferi.

[0467] In another specific embodiment, polypeptides, antibodies, polynucleotides and/or agonists or antagonists of the present invention are used as an adjuvant to enhance anti-parasitic immune responses. Anti-parasitic immune responses that may be enhanced using the compositions of the invention as an adjuvant, include parasite and parasite associated diseases or symptoms described herein or otherwise known in the art. In specific embodiments, the compositions of the invention are used as an adjuvant to enhance an immune response to a parasite. In another specific embodiment, the compositions of the invention are used as an adjuvant to enhance an immune response to Plasmodium (malaria) or Leishmania.

[0468] In another specific embodiment, polypeptides, antibodies, polynucleotides and/or agonists or antagonists of the present invention may also be employed to treat infectious diseases including silicosis, sarcoidosis, and idiopathic pulmonary fibrosis; for example, by preventing the recruitment and activation of mononuclear phagocytes.

[0469] In another specific embodiment, polypeptides, antibodies, polynucleotides and/or agonists or antagonists of the present invention are used as an antigen for the generation of antibodies to inhibit or enhance immune mediated responses against polypeptides of the invention.

[0470] In one embodiment, polypeptides, antibodies, polynucleotides and/or agonists or antagonists of the present invention are administered to an animal (e.g., mouse, rat, rabbit, hamster, guinea pig, pigs, micro-pig, chicken, camel, goat, horse, cow, sheep, dog, cat, non-human primate, and human, most preferably human) to boost the immune system to produce increased quantities of one or more antibodies (e.g., IgG, IgA, IgM, and IgE), to induce higher affinity antibody production and immunoglobulin class switching (e.g., IgG, IgA, IgM, and IgE), and/or to increase an immune response.

[0471] In another specific embodiment, polypeptides, antibodies, polynucleotides and/or agonists or antagonists of the present invention are used as a stimulator of B cell responsiveness to pathogens.

[0472] In another specific embodiment, polypeptides, antibodies, polynucleotides and/or agonists or antagonists of the present invention are used as an activator of T cells.

[0473] In another specific embodiment, polypeptides, antibodies, polynucleotides and/or agonists or antagonists of the present invention are used as an agent that elevates the immune status of an individual prior to their receipt of immunosuppressive therapies.

[0474] In another specific embodiment, polypeptides, antibodies, polynucleotides and/or agonists or antagonists of the present invention are used as an agent to induce higher affinity antibodies.

[0475] In another specific embodiment, polypeptides, antibodies, polynucleotides and/or agonists or antagonists of the present invention are used as an agent to increase serum immunoglobulin concentrations.

[0476] In another specific embodiment, polypeptides, antibodies, polynucleotides and/or agonists or antagonists of the present invention are used as an agent to accelerate recovery of immunocompromised individuals.

[0477] In another specific embodiment, polypeptides, antibodies, polynucleotides and/or agonists or antagonists of the present invention are used as an agent to boost immunoresponsiveness among aged populations and/or neonates.

[0478] In another specific embodiment, polypeptides, antibodies, polynucleotides and/or agonists or antagonists of the present invention are used as an immune system enhancer prior to, during, or after bone marrow transplant and/or other transplants (e.g., allogeneic or xenogeneic organ transplantation). With respect to transplantation, compositions of the invention may be administered prior to, concomitant with, and/or after transplantation. In a specific embodiment, compositions of the invention are administered after transplantation, prior to the beginning of recovery of T-cell populations. In another specific embodiment, compositions of the invention are first administered after transplantation after the beginning of recovery of T cell populations, but prior to full recovery of B cell populations.

[0479] In another specific embodiment, polypeptides, antibodies, polynucleotides and/or agonists or antagonists of the present invention are used as an agent to boost immunoresponsiveness among individuals having an acquired loss of B cell function. Conditions resulting in an acquired loss of B cell function that may be ameliorated or treated by administering the polypeptides, antibodies, polynucleotides and/or agonists or antagonists thereof, include, but are not limited to, HIV Infection, AIDS, bone marrow transplant, and B cell chronic lymphocytic leukemia (CLL).

[0480] In another specific embodiment, polypeptides, antibodies, polynucleotides and/or agonists or antagonists of the present invention are used as an agent to boost immunoresponsiveness among individuals having a temporary immune deficiency. Conditions resulting in a temporary immune deficiency that may be ameliorated or treated by administering the polypeptides, antibodies, polynucleotides and/or agonists or antagonists thereof, include, but are not limited to, recovery from viral infections (e.g., influenza), conditions associated with malnutrition, recovery from infectious mononucleosis, or conditions associated with stress, recovery from measles, recovery from blood transfusion, and recovery from surgery.

[0481] In another specific embodiment, polypeptides, antibodies, polynucleotides and/or agonists or antagonists of the present invention are used as a regulator of antigen presentation by monocytes, dendritic cells, and/or B-cells. In one embodiment, polynucleotides, polypeptides, antibodies, and/or agonists or antagonists of the present invention enhance antigen presentation or antagonizes antigen presentation in vitro or in vivo. Moreover, in related embodiments, said enhancement or antagonism of antigen presentation may be useful as an anti-tumor treatment or to modulate the immune system.

[0482] In another specific embodiment, polypeptides, antibodies, polynucleotides and/or agonists or antagonists of the present invention are used as an agent to direct an individual's immune system towards development of a humoral response (i.e. TH2) as opposed to a TH1 cellular response.

[0483] In another specific embodiment, polypeptides, antibodies, polynucleotides and/or agonists or antagonists of the present invention are used as a means to induce tumor proliferation and thus make it more susceptible to anti-neoplastic agents. For example, multiple myeloma is a slowly dividing disease and is thus refractory to virtually all anti-neoplastic regimens. If these cells were forced to proliferate more rapidly their susceptibility profile would likely change.

[0484] In another specific embodiment, polypeptides, antibodies, polynucleotides and/or agonists or antagonists of the present invention are used as a stimulator of B cell production in pathologies such as AIDS, chronic lymphocyte disorder and/or Common Variable Immunodificiency.

[0485] In another specific embodiment, polypeptides, antibodies, polynucleotides and/or agonists or antagonists of the present invention are used as a therapy for generation and/or regeneration of lymphoid tissues following surgery, trauma or genetic defect. In another specific embodiment, polypeptides, antibodies, polynucleotides and/or agonists or antagonists of the present invention are used in the pretreatment of bone marrow samples prior to transplant.

[0486] In another specific embodiment, polypeptides, antibodies, polynucleotides and/or agonists or antagonists of the present invention are used as a gene-based therapy for genetically inherited disorders resulting in immuno-incompetence/immunodeficiency such as observed among SCID patients.

[0487] In another specific embodiment, polypeptides, antibodies, polynucleotides and/or agonists or antagonists of the present invention are used as a means of activating monocytes/macrophages to defend against parasitic diseases that effect monocytes such as Leishmania.

[0488] In another specific embodiment, polypeptides, antibodies, polynucleotides and/or agonists or antagonists of the present invention are used as a means of regulating secreted cytokines that are elicited by polypeptides of the invention.

[0489] In another embodiment, polypeptides, antibodies, polynucleotides and/or agonists or antagonists of the present invention are used in one or more of the applications decribed herein, as they may apply to veterinary medicine.

[0490] In another specific embodiment, polypeptides, antibodies, polynucleotides and/or agonists or antagonists of the present invention are used as a means of blocking various aspects of immune responses to foreign agents or self. Examples of diseases or conditions in which blocking of certain aspects of immune responses may be desired include autoimmune disorders such as lupus, and arthritis, as well as immunoresponsiveness to skin allergies, inflammation, bowel disease, injury and diseases/disorders associated with pathogens.

[0491] In another specific embodiment, polypeptides, antibodies, polynucleotides and/or agonists or antagonists of the present invention are used as a therapy for preventing the B cell proliferation and Ig secretion associated with autoimmune diseases such as idiopathic thrombocytopenic purpura, systemic lupus erythematosus and multiple sclerosis.

[0492] In another specific embodiment, polypeptides, antibodies, polynucleotides and/or agonists or antagonists of the present invention are used as a inhibitor of B and/or T cell migration in endothelial cells. This activity disrupts tissue architecture or cognate responses and is useful, for example in disrupting immune responses, and blocking sepsis.

[0493] In another specific embodiment, polypeptides, antibodies, polynucleotides and/or agonists or antagonists of the present invention are used as a therapy for chronic hypergammaglobulinemia evident in such diseases as monoclonal gammopathy of undetermined significance (MGUS), Waldenstrom's disease, related idiopathic monoclonal gammopathies, and plasmacytomas.

[0494] In another specific embodiment, polypeptides, antibodies, polynucleotides and/or agonists or antagonists of the present invention may be employed for instance to inhibit polypeptide chemotaxis and activation of macrophages and their precursors, and of neutrophils, basophils, B lymphocytes and some T-cell subsets, e.g., activated and CD8 cytotoxic T cells and natural killer cells, in certain autoimmune and chronic inflammatory and infective diseases. Examples of autoimmune diseases are described herein and include multiple sclerosis, and insulin-dependent diabetes.

[0495] The polypeptides, antibodies, polynucleotides and/or agonists or antagonists of the present invention may also be employed to treat idiopathic hyper-eosinophilic syndrome by, for example, preventing eosinophil production and migration.

[0496] In another specific embodiment, polypeptides, antibodies, polynucleotides and/or agonists or antagonists of the present invention are used to enhance or inhibit complement mediated cell lysis.

[0497] In another specific embodiment, polypeptides, antibodies, polynucleotides and/or agonists or antagonists of the present invention are used to enhance or inhibit antibody dependent cellular cytotoxicity.

[0498] In another specific embodiment, polypeptides, antibodies, polynucleotides and/or agonists or antagonists of the present invention may also be employed for treating atherosclerosis, for example, by preventing monocyte infiltration in the artery wall.

[0499] In another specific embodiment, polypeptides, antibodies, polynucleotides and/or agonists or antagonists of the present invention may be employed to treat adult respiratory distress syndrome (ARDS).

[0500] In another specific embodiment, polypeptides, antibodies, polynucleotides and/or agonists or antagonists of the present invention may be useful for stimulating wound and tissue repair, stimulating angiogenesis, and/or stimulating the repair of vascular or lymphatic diseases or disorders. Additionally, agonists and antagonists of the invention may be used to stimulate the regeneration of mucosal surfaces.

[0501] In a specific embodiment, polynucleotides or polypeptides, and/or agonists thereof are used to diagnose, prognose, treat, and/or prevent a disorder characterized by primary or acquired immunodeficiency, deficient serum immunoglobulin production, recurrent infections, and/or immune system dysfunction. Moreover, polynucleotides or polypeptides, and/or agonists thereof may be used to treat or prevent infections of the joints, bones, skin, and/or parotid glands, blood-borne infections (e.g., sepsis, meningitis, septic arthritis, and/or osteomyelitis), autoimmune diseases (e.g., those disclosed herein), inflammatory disorders, and malignancies, and/or any disease or disorder or condition associated with these infections, diseases, disorders and/or malignancies) including, but not limited to, CVID, other primary immune deficiencies, HIV disease, CLL, recurrent bronchitis, sinusitis, otitis media, conjunctivitis, pneumonia, hepatitis, meningitis, herpes zoster (e.g., severe herpes zoster), and/or pneumocystis carnii. Other diseases and disorders that may be prevented, diagnosed, prognosed, and/or treated with polynucleotides or polypeptides, and/or agonists of the present invention include, but are not limited to, HIV infection, HTLV-BLV infection, lymphopenia, phagocyte bactericidal dysfunction anemia, thrombocytopenia, and hemoglobinuria.

[0502] In another embodiment, polynucleotides, polypeptides, antibodies, and/or agonists or antagonists of the present invention are used to treat, and/or diagnose an individual having common variable immunodeficiency disease (“CVID”; also known as “acquired agammaglobulinemia” and “acquired hypogammaglobulinemia”) or a subset of this disease.

[0503] In a specific embodiment, polynucleotides, polypeptides, antibodies, and/or agonists or antagonists of the present invention may be used to diagnose, prognose, prevent, and/or treat cancers or neoplasms including immune cell or immune tissue-related cancers or neoplasms. Examples of cancers or neoplasms that may be prevented, diagnosed, or treated by polynucleotides, polypeptides, antibodies, and/or agonists or antagonists of the present invention include, but are not limited to, acute myelogenous leukemia, chronic myelogenous leukemia, Hodgkin's disease, non-Hodgkin's lymphoma, acute lymphocytic anemia (ALL) Chronic lymphocyte leukemia, plasmacytomas, multiple myeloma, Burkitt's lymphoma, EBV-transformed diseases, and/or diseases and disorders described in the section entitled “Hyperproliferative Disorders” elsewhere herein.

[0504] In another specific embodiment, polypeptides, antibodies, polynucleotides and/or agonists or antagonists of the present invention are used as a therapy for decreasing cellular proliferation of Large B-cell Lymphomas.

[0505] In another specific embodiment, polypeptides, antibodies, polynucleotides and/or agonists or antagonists of the present invention are used as a means of decreasing the involvement of B cells and Ig associated with Chronic Myelogenous Leukemia.

[0506] In specific embodiments, the compositions of the invention are used as an agent to boost immunoresponsiveness among B cell immunodeficient individuals, such as, for example, an individual who has undergone a partial or complete splenectomy.

[0507] Antagonists of the invention include, for example, binding and/or inhibitory antibodies, antisense nucleic acids, ribozymes or soluble forms of the polypeptides of the present invention (e.g., Fc fusion protein; see, e.g., Example 9). Agonists of the invention include, for example, binding or stimulatory antibodies, and soluble forms of the polypeptides (e.g., Fc fusion proteins; see, e.g., Example 9). Polypeptides, antibodies, polynucleotides and/or agonists or antagonists of the present invention may be employed in a composition with a pharmaceutically acceptable carrier, e.g., as described herein.

[0508] In another embodiment, polypeptides, antibodies, polynucleotides and/or agonists or antagonists of the present invention are administered to an animal (including, but not limited to, those listed above, and also including transgenic animals) incapable of producing functional endogenous antibody molecules or having an otherwise compromised endogenous immune system, but which is capable of producing human immunoglobulin molecules by means of a reconstituted or partially reconstituted immune system from another animal (see, e.g., published PCT Application Nos. WO98/24893, WO/9634096, WO/9633735, and WO/9110741). Administration of polypeptides, antibodies, polynucleotides and/or agonists or antagonists of the present invention to such animals is useful for the generation of monoclonal antibodies against the polypeptides, antibodies, polynucleotides and/or agonists or antagonists of the present invention.

[0509] Blood-Related Disorders

[0510] The polynucleotides, polypeptides, antibodies, and/or agonists or antagonists of the present invention may be used to modulate hemostatic (the stopping of bleeding) or thrombolytic (clot dissolving) activity. For example, by increasing hemostatic or thrombolytic activity, polynucleotides or polypeptides, and/or agonists or antagonists of the present invention could be used to treat or prevent blood coagulation diseases, disorders, and/or conditions (e.g., afibrinogenemia, factor deficiencies, hemophilia), blood platelet diseases, disorders, and/or conditions (e.g., thrombocytopenia), or wounds resulting from trauma, surgery, or other causes. Alternatively, polynucleotides, polypeptides, antibodies, and/or agonists or antagonists of the present invention that can decrease hemostatic or thrombolytic activity could be used to inhibit or dissolve clotting. These molecules could be important in the treatment or prevention of heart attacks (infarction), strokes, or scarring.

[0511] In specific embodiments, the polynucleotides, polypeptides, antibodies, and/or agonists or antagonists of the present invention may be used to prevent, diagnose, prognose, and/or treat thrombosis, arterial thrombosis, venous thrombosis, thromboembolism, pulmonary embolism, atherosclerosis, myocardial infarction, transient ischemic attack, unstable angina. In specific embodiments, the polynucleotides, polypeptides, antibodies, and/or agonists or antagonists of the present invention may be used for the prevention of occulsion of saphenous grafts, for reducing the risk of periprocedural thrombosis as might accompany angioplasty procedures, for reducing the risk of stroke in patients with atrial fibrillation including nonrheumatic atrial fibrillation, for reducing the risk of embolism associated with mechanical heart valves and or mitral valves disease. Other uses for the polynucleotides, polypeptides, antibodies, and/or agonists or antagonists of the present invention, include, but are not limited to, the prevention of occlusions in extrcorporeal devices (e.g., intravascular canulas, vascular access shunts in hemodialysis patients, hemodialysis machines, and cardiopulmonary bypass machines).

[0512] The polynucleotides, polypeptides, antibodies, and/or agonists or antagonists of the present invention may be used to modulate hematopoietic activity (the formation of blood cells). For example, the polynucleotides, polypeptides, antibodies, and/or agonists or antagonists of the present invention may be used to increase the quantity of all or subsets of blood cells, such as, for example, erythrocytes, lymphocytes (B or T cells), myeloid cells (e.g., basophils, eosinophils, neutrophils, mast cells, macrophages) and platelets. The ability to decrease the quantity of blood cells or subsets of blood cells may be useful in the prevention, detection, diagnosis and/or treatment of anemias and leukopenias described below. Alternatively, the polynucleotides, polypeptides, antibodies, and/or agonists or antagonists of the present invention may be used to decrease the quantity of all or subsets of blood cells, such as, for example, erythrocytes, lymphocytes (B or T cells), myeloid cells (e.g., basophils, eosinophils, neutrophils, mast cells, macrophages) and platelets.. The ability to decrease the quantity of blood cells or subsets of blood cells may be useful in the prevention, detection, diagnosis and/or treatment of leukocytoses, such as, for example eosinophilia.

[0513] The polynucleotides, polypeptides, antibodies, and/or agonists or antagonists of the present invention may be used to prevent, treat, or diagnose blood dyscrasia.

[0514] Anemias are conditions in which the number of red blood cells or amount of hemoglobin (the protein that carries oxygen) in them is below normal. Anemia may be caused by excessive bleeding, decreased red blood cell production, or increased red blood cell destruction (hemolysis). The polynucleotides, polypeptides, antibodies, and/or agonists or antagonists of the present invention may be useful in treating, preventing, and/or diagnosing anemias. Anemias that may be treated prevented or diagnosed by the polynucleotides, polypeptides, antibodies, and/or agonists or antagonists of the present invention include iron deficiency anemia, hypochromic anemia, microcytic anemia, chlorosis, hereditary siderob;astic anemia, idiopathic acquired sideroblastic anemia, red cell aplasia, megaloblastic anemia (e.g., pernicious anemia, (vitamin B12 deficiency) and folic acid deficiency anemia), aplastic anemia, hemolytic anemias (e.g., autoimmune helolytic anemia, microangiopathic hemolytic anemia, and paroxysmal nocturnal hemoglobinuria). The polynucleotides, polypeptides, antibodies, and/or agonists or antagonists of the present invention may be useful in treating, preventing, and/or diagnosing anemias associated with diseases including but not limited to, anemias associated with systemic lupus erythematosus, cancers, lymphomas, chronic renal disease, and enlarged spleens. The polynucleotides, polypeptides, antibodies, and/or agonists or antagonists of the present invention may be useful in treating, preventing, and/or diagnosing anemias arising from drug treatments such as anemias associated with methyldopa, dapsone, and/or sulfadrugs. Additionally, rhe polynucleotides, polypeptides, antibodies, and/or agonists or antagonists of the present invention may be useful in treating, preventing, and/or diagnosing anemias associated with abnormal red blood cell architecture including but not limited to, hereditary spherocytosis, hereditary elliptocytosis, glucose-6-phosphate dehydrogenase deficiency, and sickle cell anemia.

[0515] The polynucleotides, polypeptides, antibodies, and/or agonists or antagonists of the present invention may be useful in treating, preventing, and/or diagnosing hemoglobin abnormalities, (e.g., those associated with sickle cell anemia, hemoglobin C disease, hemoglobin S-C disease, and hemoglobin E disease). Additionally, the polynucleotides, polypeptides, antibodies, and/or agonists or antagonists of the present invention may be useful in diagnosing, prognosing, preventing, and/or treating thalassemias, including, but not limited to major and minor forms of alpha-thalassemia and beta-thalassemia.

[0516] In another embodiment, the polynucleotides, polypeptides, antibodies, and/or agonists or antagonists of the present invention may be useful in diagnosing, prognosing, preventing, and/or treating bleeding disorders including, but not limited to, thrombocytopenia (e.g., idiopathic thrombocytopenic purpura, and thrombotic thrombocytopenic purpura), Von Willebrand's disease, hereditary platelet disorders (e.g., storage pool disease such as Chediak-Higashi and Hermansky-Pudlak syndromes, thromboxane A2 dysfunction, thromboasthenia, and Bernard-Soulier syndrome), hemolytic-uremic syndrome, hemophelias such as hemophelia A or Factor VII deficiency and Christmas disease or Factor IX deficiency, Hereditary Hemorhhagic Telangiectsia, also known as Rendu-Osler-Weber syndrome, allergic purpura (Henoch Schonlein purpura) and disseminated intravascular coagulation.

[0517] The effect of the polynucleotides, polypeptides, antibodies, and/or agonists or antagonists of the present invention on the clotting time of blood may be monitored using any of the clotting tests known in the art including, but not limited to, whole blood partial thromboplastin time (PTT), the activated partial thromboplastin time (aPTT), the activated clotting time (ACT), the recalcified activated clotting time, or the Lee-White Clotting time.

[0518] Several diseases and a variety of drugs can cause platelet dysfunction. Thus, in a specific embodiment, the polynucleotides, polypeptides, antibodies, and/or agonists or antagonists of the present invention may be useful in diagnosing, prognosing, preventing, and/or treating acquired platelet dysfunction such as platelet dysfunction accompanying kidney failure, leukemia, multiple myeloma, cirrhosis of the liver, and systemic lupus erythematosus as well as platelet dysfunction associated with drug treatments, including treatment with aspirin, ticlopidine, nonsteroidal anti-inflammatory drugs (used for arthritis, pain, and sprains), and penicillin in high doses.

[0519] In another embodiment, the polynucleotides, polypeptides, antibodies, and/or agonists or antagonists of the present invention may be useful in diagnosing, prognosing, preventing, and/or treating diseases and disorders characterized by or associated with increased or decreased numbers of white blood cells. Leukopenia occurs when the number of white blood cells decreases below normal. Leukopenias include, but are not limited to, neutropenia and lymphocytopenia. An increase in the number of white blood cells compared to normal is known as leukocytosis. The body generates increased numbers of white blood cells during infection. Thus, leukocytosis may simply be a normal physiological parameter that reflects infection. Alternatively, leukocytosis may be an indicator of injury or other disease such as cancer. Leokocytoses, include but are not limited to, eosinophilia, and accumulations of macrophages. In specific embodiments, the polynucleotides, polypeptides, antibodies, and/or agonists or antagonists of the present invention may be useful in diagnosing, prognosing, preventing, and/or treating leukopenia. In other specific embodiments, the polynucleotides, polypeptides, antibodies, and/or agonists or antagonists of the present invention may be useful in diagnosing, prognosing, preventing, and/or treating leukocytosis.

[0520] Leukopenia may be a generalized decreased in all types of white blood cells, or may be a specific depletion of particular types of white blood cells. Thus, in specific embodiments, the polynucleotides, polypeptides, antibodies, and/or agonists or antagonists of the present invention may be useful in diagnosing, prognosing, preventing, and/or treating decreases in neutrophil numbers, known as neutropenia. Neutropenias that may be diagnosed, prognosed, prevented, and/or treated by the polynucleotides, polypeptides, antibodies, and/or agonists or antagonists of the present invention include, but are not limited to, infantile genetic agranulocytosis, familial neutropenia, cyclic neutropenia, neutropenias resulting from or associated with dietary deficiencies (e.g., vitamin B 12 deficiency or folic acid deficiency), neutropenias resulting from or associated with drug treatments (e.g., antibiotic regimens such as penicillin treatment, sulfonamide treatment, anticoagulant treatment, anticonvulsant drugs, anti-thyroid drugs, and cancer chemotherapy), and neutropenias resulting from increased neutrophil destruction that may occur in association with some bacterial or viral infections, allergic disorders, autoimmune diseases, conditions in which an individual has an enlarged spleen (e.g., Felty syndrome, malaria and sarcoidosis), and some drug treatment regimens.

[0521] The polynucleotides, polypeptides, antibodies, and/or agonists or antagonists of the present invention may be useful in diagnosing, prognosing, preventing, and/or treating lymphocytopenias (decreased numbers of B and/or T lymphocytes), including, but not limited lymphocytopenias resulting from or associated with stress, drug treatments (e.g., drug treatment with corticosteroids, cancer chemotherapies, and/or radiation therapies), AIDS infection and/or other diseases such as, for example, cancer, rheumatoid arthritis, systemic lupus erythematosus, chronic infections, some viral infections and/or hereditary disorders (e.g., DiGeorge syndrome, Wiskott-Aldrich Syndome, severe combined immunodeficiency, ataxia telangiectsia).

[0522] The polynucleotides, polypeptides, antibodies, and/or agonists or antagonists of the present invention may be useful in diagnosing, prognosing, preventing, and/or treating diseases and disorders associated with macrophage numbers and/or macrophage function including, but not limited to, Gaucher's disease, Niemann-Pick disease, Letterer-Siwe disease and Hand-Schuller-Christian disease.

[0523] In another embodiment, the polynucleotides, polypeptides, antibodies, and/or agonists or antagonists of the present invention may be useful in diagnosing, prognosing, preventing, and/or treating diseases and disorders associated with eosinophil numbers and/or eosinophil function including, but not limited to, idiopathic hypereosinophilic syndrome, eosinophilia-myalgia syndrome, and Hand-Schuller-Christian disease.

[0524] In yet another embodiment, the polynucleotides, polypeptides, antibodies, and/or agonists or antagonists of the present invention may be useful in diagnosing, prognosing, preventing, and/or treating leukemias and lymphomas including, but not limited to, acute lymphocytic (lymphpblastic) leukemia (ALL), acute myeloid (myelocytic, myelogenous, myeloblastic, or myelomonocytic) leukemia, chronic lymphocytic leukemia (e.g., B cell leukemias, T cell leukemias, Sezary syndrome, and Hairy cell leukenia), chronic myelocytic (myeloid, myelogenous, or granulocytic) leukemia, Hodgkin's lymphoma, non-hodgkin's lymphoma, Burkitt's lymphoma, and mycosis fungoides.

[0525] In other embodiments, the polynucleotides, polypeptides, antibodies, and/or agonists or antagonists of the present invention may be useful in diagnosing, prognosing, preventing, and/or treating diseases and disorders of plasma cells including, but not limited to, plasma cell dyscrasias, monoclonal gammaopathies, monoclonal gammopathies of undetermined significance, multiple myeloma, macroglobulinemia, Waldenstrom's macroglobulinemia, cryoglobulinemia, and Raynaud's phenomenon.

[0526] In other embodiments, the polynucleotides, polypeptides, antibodies, and/or agonists or antagonists of the present invention may be useful in treating, preventing, and/or diagnosing myeloproliferative disorders, including but not limited to, polycythemia vera, relative polycythemia, secondary polycythemia, myelofibrosis, acute myelofibrosis, agnogenic myelod metaplasia, thrombocythemia, (including both primary and seconday thrombocythemia) and chronic myelocytic leukemia.

[0527] In other embodiments, the polynucleotides, polypeptides, antibodies, and/or agonists or antagonists of the present invention may be useful as a treatment prior to surgery, to increase blood cell production.

[0528] In other embodiments, the polynucleotides, polypeptides, antibodies, and/or agonists or antagonists of the present invention may be useful as an agent to enhance the migration, phagocytosis, superoxide production, antibody dependent cellular cytotoxicity of neutrophils, eosionophils and macrophages.

[0529] In other embodiments, the polynucleotides, polypeptides, antibodies, and/or agonists or antagonists of the present invention may be useful as an agent to increase the number of stem cells in circulation prior to stem cells pheresis. In another specific embodiment, the polynucleotides, polypeptides, antibodies, and/or agonists or antagonists of the present invention may be useful as an agent to increase the number of stem cells in circulation prior to platelet pheresis.

[0530] In other embodiments, the polynucleotides, polypeptides, antibodies, and/or agonists or antagonists of the present invention may be useful as an agent to increase cytokine production.

[0531] In other embodiments, the polynucleotides, polypeptides, antibodies, and/or agonists or antagonists of the present invention may be useful in preventing, diagnosing, and/or treating primary hematopoietic disorders.

[0532] Hyperproliferative Disorders

[0533] Prostate cancer associated polynucleotides or polypeptides, or agonists or antagonists thereof, can be used to treat, prevent, diagnose and/or prognose hyperproliferative diseases, disorders, and/or conditions, including neoplasms.

[0534] In a specific embodiment, prostate cancer associated polynucleotides or polypeptides, or agonists or antagonists thereof, can be used to treat, prevent, and/or diagnose hyperproliferative diseases, disorders, and/or conditions of the prostate.

[0535] In a preferred embodiment, prostate cancer associated polynucleotides or polypeptides, or agonists or antagonists thereof, can be used to treat, prevent, and/or diagnose prostate neoplasms.

[0536] Prostate cancer associated polynucleotides or polypeptides, or agonists or antagonists of the invention, may inhibit the proliferation of the disorder through direct or indirect interactions. Alternatively, prostate cancer associated polynucleotides or polypeptides, or agonists or antagonists thereof, may proliferate other cells, which can inhibit the hyperproliferative disorder.

[0537] For example, by increasing an immune response, particularly increasing antigenic qualities of the hyperproliferative disorder or by proliferating, differentiating, or mobilizing T-cells, hyperproliferative diseases, disorders, and/or conditions can be treated, prevented, and/or diagnosed. This immune response may be increased by either enhancing an existing immune response, or by initiating a new immune response. Alternatively, decreasing an immune response may also be a method of treating, preventing, and/or diagnosing hyperproliferative diseases, disorders, and/or conditions, such as a chemotherapeutic agent.

[0538] Examples of hyperproliferative diseases, disorders, and/or conditions that can be treated, prevented, and/or diagnosed by prostate cancer associated polynucleotides or polypeptides, or agonists or antagonists thereof, include, but are not limited to neoplasms located in the: prostate, colon, abdomen, bone, breast, digestive system, liver, pancreas, peritoneum, endocrine glands (adrenal, parathyroid, pituitary, testicles, ovary, thymus, thyroid), eye, head and neck, nervous (central and peripheral), lymphatic system, pelvic, skin, soft tissue, spleen, thoracic, and urogenital.

[0539] Similarly, other hyperproliferative disorders can also be treated or detected by polynucleotides or polypeptides, or agonists or antagonists of the present invention. Examples of such hyperproliferative disorders include, but are not limited to: Acute Childhood Lymphoblastic Leukemia, Acute Lymphoblastic Leukemia, Acute Lymphocytic Leukemia, Acute Myeloid Leukemia, Adrenocortical Carcinoma, Adult (Primary) Hepatocellular Cancer, Adult (Primary) Liver Cancer, Adult Acute Lymphocytic Leukemia, Adult Acute Myeloid Leukemia, Adult Hodgkin's Disease, Adult Hodgkin's Lymphoma, Adult Lymphocytic Leukemia, Adult Non-Hodgkin's Lymphoma, Adult Primary Liver Cancer, Adult Soft Tissue Sarcoma, AIDS-Related Lymphoma, AIDS-Related Malignancies, Anal Cancer, Astrocytoma, Bile Duct Cancer, Bladder Cancer, Bone Cancer, Brain Stem Glioma, Brain Tumors, Breast Cancer, Cancer of the Renal Pelvis and Ureter, Central Nervous System (Primary) Lymphoma, Central Nervous System Lymphoma, Cerebellar Astrocytoma, Cerebral Astrocytoma, Cervical Cancer, Childhood (Primary) Hepatocellular Cancer, Childhood (Primary) Liver Cancer, Childhood Acute Lymphoblastic Leukemia, Childhood Acute Myeloid Leukemia, Childhood Brain Stem Glioma, Childhood Cerebellar Astrocytoma, Childhood Cerebral Astrocytoma, Childhood Extracranial Germ Cell Tumors, Childhood Hodgkin's Disease, Childhood Hodgkin's Lymphoma, Childhood Hypothalamic and Visual Pathway Glioma, Childhood Lymphoblastic Leukemia, Childhood Medulloblastoma, Childhood Non-Hodgkin's Lymphoma, Childhood Pineal and Supratentorial Primitive Neuroectodermal Tumors, Childhood Primary Liver Cancer, Childhood Rhabdomyosarcoma, Childhood Soft Tissue Sarcoma, Childhood Visual Pathway and Hypothalamic Glioma, Chronic Lymphocytic Leukemia, Chronic Myelogenous Leukemia, Colon Cancer, Cutaneous T-Cell Lymphoma, Endocrine Pancreas Islet Cell Carcinoma, Endometrial Cancer, Ependymoma, Epithelial Cancer, Esophageal Cancer, Ewing's Sarcoma and Related Tumors, Exocrine Pancreatic Cancer, Extracranial Germ Cell Tumor, Extragonadal Germ Cell Tumor, Extrahepatic Bile Duct Cancer, Eye Cancer, Female Breast Cancer, Gaucher's Disease, Gallbladder Cancer, Gastric Cancer, Gastrointestinal Carcinoid Tumor, Gastrointestinal Tumors, Germ Cell Tumors, Gestational Trophoblastic Tumor, Hairy Cell Leukemia, Head and Neck Cancer, Hepatocellular Cancer, Hodgkin's Disease, Hodgkin's Lymphoma, Hypergammaglobulinemia, Hypopharyngeal Cancer, Intestinal Cancers, Intraocular Melanoma, Islet Cell Carcinoma, Islet Cell Pancreatic Cancer, Kaposi's Sarcoma, Kidney Cancer, Laryngeal Cancer, Lip and Oral Cavity Cancer, Liver Cancer, Lung Cancer, Lymphoproliferative Disorders, Macroglobulinemia, Male Breast Cancer, Malignant Mesothelioma, Malignant Thymoma, Medulloblastoma, Melanoma, Mesothelioma, Metastatic Occult Primary Squamous Neck Cancer, Metastatic Primary Squamous Neck Cancer, Metastatic Squamous Neck Cancer, Multiple Myeloma, Multiple Myeloma/Plasma Cell Neoplasm, Myelodysplastic Syndrome, Myelogenous Leukemia, Myeloid Leukemia, Myeloproliferative Disorders, Nasal Cavity and Paranasal Sinus Cancer, Nasopharyngeal Cancer, Neuroblastoma, Non-Hodgkin's Lymphoma During Pregnancy, Nonmelanoma Skin Cancer, Non-Small Cell Lung Cancer, Occult Primary Metastatic Squamous Neck Cancer, Oropharyngeal Cancer, Osteo-/Malignant Fibrous Sarcoma, Osteosarcoma/Malignant Fibrous Histiocytoma, Osteosarcoma/Malignant Fibrous Histiocytoma of Bone, Ovarian Epithelial Cancer, Ovarian Germ Cell Tumor, Ovarian Low Malignant Potential Tumor, Pancreatic Cancer, Paraproteinemias, Purpura, Parathyroid Cancer, Penile Cancer, Pheochromocytoma, Pituitary Tumor, Plasma Cell Neoplasmn/Multiple Myeloma, Primary Central Nervous System Lymphoma, Primary Liver Cancer, Prostate Cancer, Rectal Cancer, Renal Cell Cancer, Renal Pelvis and Ureter Cancer, Retinoblastoma, Rhabdomyosarcoma, Salivary Gland Cancer, Sarcoidosis Sarcomas, Sezary Syndrome, Skin Cancer, Small Cell Lung Cancer, Small Intestine Cancer, Soft Tissue Sarcoma, Squamous Neck Cancer, Stomach Cancer, Supratentorial Primitive Neuroectodermal and Pineal Tumors, T-Cell Lymphoma, Testicular Cancer, Thymoma, Thyroid Cancer, Transitional Cell Cancer of the Renal Pelvis and Ureter, Transitional Renal Pelvis and Ureter Cancer, Trophoblastic Tumors, Ureter and Renal Pelvis Cell Cancer, Urethral Cancer, Uterine Cancer, Uterine Sarcoma, Vaginal Cancer, Visual Pathway and Hypothalamic Glioma, Vulvar Cancer, Waldenstrom's Macroglobulinemia, Wilms' Tumor, and any other hyperproliferative disease, besides neoplasia, located in an organ system listed above.

[0540] In another preferred embodiment, polynucleotides or polypeptides, or agonists or antagonists of the present invention are used to diagnose, prognose, prevent, and/or treat premalignant conditions and to prevent progression to a neoplastic or malignant state, including but not limited to those disorders described above. Such uses are indicated in conditions known or suspected of preceding progression to neoplasia or cancer, in particular, where non-neoplastic cell growth consisting of hyperplasia, metaplasia, or most particularly, dysplasia has occurred (for review of such abnormal growth conditions, see Robbins and Angell, 1976, Basic Pathology, 2d Ed., W. B. Saunders Co., Philadelphia, pp. 68-79.)

[0541] Hyperplasia is a form of controlled cell proliferation, involving an increase in cell number in a tissue or organ, without significant alteration in structure or function. Hyperplastic disorders which can be diagnosed, prognosed, prevented, and/or treated with compositions of the invention (including polynucleotides, polypeptides, agonists or antagonists) include, but are not limited to, angiofollicular mediastinal lymph node hyperplasia, angiolymphoid hyperplasia with eosinophilia, atypical melanocytic hyperplasia, basal cell hyperplasia, benign giant lymph node hyperplasia, cementum hyperplasia, congenital adrenal hyperplasia, congenital sebaceous hyperplasia, cystic hyperplasia, cystic hyperplasia of the breast, denture hyperplasia, ductal hyperplasia, endometrial hyperplasia, fibromuscular hyperplasia, focal epithelial hyperplasia, gingival hyperplasia, inflammatory fibrous hyperplasia, inflammatory papillary hyperplasia, intravascular papillary endothelial hyperplasia, nodular hyperplasia of prostate, nodular regenerative hyperplasia, pseudoepitheliomatous hyperplasia, senile sebaceous hyperplasia, and verrucous hyperplasia.

[0542] Metaplasia is a form of controlled cell growth in which one type of adult or fully differentiated cell substitutes for another type of adult cell. Metaplastic disorders which can be diagnosed, prognosed, prevented, and/or treated with compositions of the invention (including polynucleotides, polypeptides, agonists or antagonists) include, but are not limited to, agnogenic myeloid metaplasia, apocrine metaplasia, atypical metaplasia, autoparenchymatous metaplasia, connective tissue metaplasia, epithelial metaplasia, intestinal metaplasia, metaplastic anemia, metaplastic ossification, metaplastic polyps, myeloid metaplasia, primary myeloid metaplasia, secondary myeloid metaplasia, squamous metaplasia, squamous metaplasia of amnion, and symptomatic myeloid metaplasia.

[0543] Dysplasia is frequently a forerunner of cancer, and is found mainly in the epithelia; it is the most disorderly form of non-neoplastic cell growth, involving a loss in individual cell uniformity and in the architectural orientation of cells. Dysplastic cells often have abnormally large, deeply stained nuclei, and exhibit pleomorphism. Dysplasia characteristically occurs where there exists chronic irritation or inflammation. Dysplastic disorders which can be diagnosed, prognosed, prevented, and/or treated with compositions of the invention (including polynucleotides, polypeptides, agonists or antagonists) include, but are not limited to, anhidrotic ectodermal dysplasia, anterofacial dysplasia, asphyxiating thoracic dysplasia, atriodigital dysplasia, bronchopulmonary dysplasia, cerebral dysplasia, cervical dysplasia, chondroectodermal dysplasia, cleidocranial dysplasia, congenital ectodermal dysplasia, craniodiaphysial dysplasia, craniocarpotarsal dysplasia, craniometaphysial dysplasia, dentin dysplasia, diaphysial dysplasia, ectodermal dysplasia, enamel dysplasia, encephalo-ophthalmic dysplasia, dysplasia epiphysialis hemimelia, dysplasia epiphysialis multiplex, dysplasia epiphysialis punctata, epithelial dysplasia, faciodigitogenital dysplasia, familial fibrous dysplasia of jaws, familial white folded dysplasia, fibromuscular dysplasia, fibrous dysplasia of bone, florid osseous dysplasia, hereditary renal-retinal dysplasia, hidrotic ectodermal dysplasia, hypohidrotic ectodermal dysplasia, lymphopenic thymic dysplasia, mammary dysplasia, mandibulofacial dysplasia, metaphysial dysplasia, Mondini dysplasia, monostotic fibrous dysplasia, mucoepithelial dysplasia, multiple epiphysial dysplasia, oculoauriculovertebral dysplasia, oculodentodigital dysplasia, oculovertebral dysplasia, odontogenic dysplasia, ophthalmomandibulomelic dysplasia, periapical cemental dysplasia, polyostotic fibrous dysplasia, pseudoachondroplastic spondyloepiphysial dysplasia, retinal dysplasia, septo-optic dysplasia, spondyloepiphysial dysplasia, and ventriculoradial dysplasia.

[0544] Additional pre-neoplastic disorders which can be diagnosed, prognosed, prevented, and/or treated with compositions of the invention (including polynucleotides, polypeptides, agonists or antagonists) include, but are not limited to, benign dysproliferative disorders (e.g., benign tumors, fibrocystic conditions, tissue hypertrophy, intestinal polyps, colon polyps, and esophageal dysplasia), leukoplakia, keratoses, Bowen's disease, Farmer's Skin, solar cheilitis, and solar keratosis.

[0545] In another embodiment, polynucleotides, polypeptides, antibodies, and/or agonists or antagonists of the present invention conjugated to a toxin or a radioactive isotope, as described herein, may be used to treat cancers and neoplasms, including, but not limited to those described herein. In a further preferred embodiment, polynucleotides, polypeptides, antibodies, and/or agonists or antagonists of the present invention conjugated to a toxin or a radioactive isotope, as described herein, may be used to treat acute myelogenous leukemia.

[0546] Additionally, polynucleotides, polypeptides, and/or agonists or antagonists of the invention may affect apoptosis, and therefore, would be useful in treating a number of diseases associated with increased cell survival or the inhibition of apoptosis. For example, diseases associated with increased cell survival or the inhibition of apoptosis that could be diagnosed, prognosed, prevented, and/or treated by polynucleotides, polypeptides, and/or agonists or antagonists of the invention, include cancers (such as follicular lymphomas, carcinomas with p53 mutations, and hormone-dependent tumors, including, but not limited to colon cancer, cardiac tumors, pancreatic cancer, melanoma, retinoblastoma, glioblastoma, lung cancer, intestinal cancer, testicular cancer, stomach cancer, neuroblastoma, myxoma, myoma, lymphoma, endothelioma, osteoblastoma, osteoclastoma, osteosarcoma, chondrosarcoma, adenoma, breast cancer, prostate cancer, Kaposi's sarcoma and ovarian cancer); autoimmune disorders such as, multiple sclerosis, Sjogren's syndrome, Hashimoto's thyroiditis, biliary cirrhosis, Behcet's disease, Crohn's disease, polymyositis, systemic lupus erythematosus and immune-related glomerulonephritis and rheumatoid arthritis) and viral infections (such as herpes viruses, pox viruses and adenoviruses), inflammation, graft v. host disease, acute graft rejection, and chronic graft rejection.

[0547] In preferred embodiments, polynucleotides, polypeptides, and/or agonists or antagonists of the invention are used to inhibit growth, progression, and/or metastasis of cancers, in particular those listed above.

[0548] Additional diseases or conditions associated with increased cell survival that could be diagnosed, prognosed, prevented, and/or treated by polynucleotides, polypeptides, and/or agonists or antagonists of the invention, include, but are not limited to, progression, and/or metastases of malignancies and related disorders such as leukemia (including acute leukemias (e.g., acute lymphocytic leukemia, acute myelocytic leukemia (including myeloblastic, promyelocytic, myelomonocytic, monocytic, and erythroleukemia)) and chronic leukemias (e.g., chronic myelocytic (granulocytic) leukemia and chronic lymphocytic leukemia)), polycythemia vera, lymphomas (e.g., Hodgkin's disease and non-Hodgkin's disease), multiple myeloma, Waldenstrom's macroglobulinemia, heavy chain disease, and solid tumors including, but not limited to, sarcomas and carcinomas such as fibrosarcoma, myxosarcoma, liposarcoma, chondrosarcoma, osteogenic sarcoma, chordoma, angiosarcoma, endotheliosarcoma, lymphangiosarcoma, lymphangioendotheliosarcoma, synovioma, mesothelioma, Ewing's tumor, leiomyosarcoma, rhabdomyosarcoma, colon carcinoma, pancreatic cancer, breast cancer, ovarian cancer, prostate cancer, squamous cell carcinoma, basal cell carcinoma, adenocarcinoma, sweat gland carcinoma, sebaceous gland carcinoma, papillary carcinoma, papillary adenocarcinomas, cystadenocarcinoma, medullary carcinoma, bronchogenic carcinoma, renal cell carcinoma, hepatoma, bile duct carcinoma, choriocarcinoma, seminoma, embryonal carcinoma, Wilm's tumor, cervical cancer, testicular tumor, lung carcinoma, small cell lung carcinoma, bladder carcinoma, epithelial carcinoma, glioma, astrocytoma, medulloblastoma, craniopharyngioma, ependymoma, pinealoma, emangioblastoma, acoustic neuroma, oligodendroglioma, menangioma, melanoma, neuroblastoma, and retinoblastoma.

[0549] Diseases associated with increased apoptosis that could be diagnosed, prognosed, prevented, and/or treated by polynucleotides, polypeptides, and/or agonists or antagonists of the invention, include AIDS; neurodegenerative disorders (such as Alzheimer's disease, Parkinson's disease, amyotrophic lateral sclerosis, retinitis pigmentosa, cerebellar degeneration and brain tumor or prior associated disease); autoimmune disorders (such as, multiple sclerosis, Sjogren's syndrome, Hashimoto's thyroiditis, biliary cirrhosis, Behcet's disease, Crohn's disease, polymyositis, systemic lupus erythematosus and immune-related glomerulonephritis and rheumatoid arthritis) myelodysplastic syndromes (such as aplastic anemia), graft v. host disease, ischemic injury (such as that caused by myocardial infarction, stroke and reperfusion injury), liver injury (e.g., hepatitis related liver injury, ischemia/reperfusion injury, cholestosis (bile duct injury) and liver cancer); toxin-induced liver disease (such as that caused by alcohol), septic shock, cachexia and anorexia.

[0550] Hyperproliferative diseases and/or disorders that could be diagnosed, prognosed, prevented, and/or treated by polynucleotides, polypeptides, and/or agonists or antagonists of the invention, include, but are not limited to, neoplasms located in the liver, abdomen, bone, breast, digestive system, pancreas, peritoneum, endocrine glands (adrenal, parathyroid, pituitary, testicles, ovary, thymus, thyroid), eye, head and neck, nervous system (central and peripheral), lymphatic system, pelvis, skin, soft tissue, spleen, thorax, and urogenital tract.

[0551] Similarly, other hyperproliferative disorders can also be diagnosed, prognosed, prevented, and/or treated by polynucleotides, polypeptides, and/or agonists or antagonists of the invention. Examples of such hyperproliferative disorders include, but are not limited to: hypergammaglobulinemia, lymphoproliferative disorders, paraproteinemias, purpura, sarcoidosis, Sezary Syndrome, Waldenstron's macroglobulinemia, Gaucher's Disease, histiocytosis, and any other hyperproliferative disease, besides neoplasia, located in an organ system listed above.

[0552] One preferred embodiment utilizes polynucleotides of the present invention to inhibit aberrant cellular division, by gene therapy using the present invention, and/or protein fusions or fragments thereof.

[0553] Thus, the present invention provides a method for treating cell proliferative diseases, disorders, and/or conditions by inserting into an abnormally proliferating cell a polynucleotide of the present invention, wherein said polynucleotide represses said cell proliferation, disease, disorder, and/or condition.

[0554] In a preferred embodiment, the present invention provides a method for treating cell proliferative diseases, disorders and/or conditions of the prostate cancer by inserting into a cell, a polynucleotide of the present invention, wherein said polynucleotide represses said cell proliferation, disease and/or disorder.

[0555] Another embodiment of the present invention provides a method of treating cell-proliferative diseases, disorders, and/or conditions in individuals comprising administration of one or more active gene copies of the present invention to an abnormally proliferating cell or cells. In a preferred embodiment, polynucleotides of the present invention is a DNA construct comprising a recombinant expression vector effective in expressing a DNA sequence encoding said polynucleotides. In another preferred embodiment of the present invention, the DNA construct encoding the polynucleotides of the present invention is inserted into cells to be treated utilizing a retrovirus, or more preferably an adenoviral vector (see, e.g., G J. Nabel, et. al., PNAS 96: 324-326 (1999), which is hereby incorporated by reference). In a most preferred embodiment, the viral vector is defective and will not transform non-proliferating cells, only proliferating cells. Moreover, in a preferred embodiment, the polynucleotides of the present invention inserted into proliferating cells either alone, or in combination with or fused to other polynucleotides, can then be modulated via an external stimulus (i.e., magnetic, specific small molecule, chemical, or drug administration, etc.), which acts upon the promoter upstream of said polynucleotides to induce expression of the encoded protein product. As such the beneficial therapeutic affect of the present invention may be expressly modulated (i.e., to increase, decrease, or inhibit expression of the present invention) based upon said external stimulus.

[0556] Polynucleotides of the present invention may be useful in repressing expression of oncogenic genes or antigens. By “repressing expression of the oncogenic genes ” is intended the suppression of the transcription of the gene, the degradation of the gene transcript (pre-message RNA), the inhibition of splicing, the destruction of the messenger RNA, the prevention of the post-translational modifications of the protein, the destruction of the protein, or the inhibition of the normal function of the protein.

[0557] For local administration to abnormally proliferating cells, polynucleotides of the present invention may be administered by any method known to those of skill in the art including, but not limited to transfection, electroporation, microinjection of cells, or in vehicles such as liposomes, lipofectin, or as naked polynucleotides, or any other method described throughout the specification. The polynucleotide of the present invention may be delivered by known gene delivery systems such as, but not limited to, retroviral vectors (Gilboa, J. Virology 44:845 (1982); Hocke, Nature 320:275 (1986); Wilson, et al., Proc. Natl. Acad. Sci. U.S.A. 85:3014), vaccinia virus system (Chakrabarty et al., Mol. Cell Biol. 5:3403 (1985) or other efficient DNA delivery systems (Yates et al., Nature 313:812 (1985)) known to those skilled in the art. These references are exemplary only and are hereby incorporated by reference. In order to specifically deliver or transfect cells which are abnormally proliferating and spare non-dividing cells, it is preferable to utilize a retrovirus, or adenoviral (as described in the art and elsewhere herein) delivery system known to those of skill in the art. Since host DNA replication is required for retroviral DNA to integrate and the retrovirus will be unable to self replicate due to the lack of the retrovirus genes needed for its life cycle. Utilizing such a retroviral delivery system for polynucleotides of the present invention will target said gene and constructs to abnormally proliferating cells and will spare the non-dividing normal cells.

[0558] The polynucleotides of the present invention may be delivered directly to cell proliferative disorder/disease sites in internal organs, body cavities and the like by use of imaging devices used to guide an injecting needle directly to the disease site. The polynucleotides of the present invention may also be administered to disease sites at the time of surgical intervention.

[0559] By “cell proliferative disease” is meant any human or animal disease or disorder, affecting any one or any combination of organs, cavities, or body parts, which is characterized by single or multiple local abnormal proliferations of cells, groups of cells, or tissues, whether benign or malignant.

[0560] Any amount of the polynucleotides of the present invention may be administered as long as it has a biologically inhibiting effect on the proliferation of the treated cells. Moreover, it is possible to administer more than one of the polynucleotide of the present invention simultaneously to the same site. By “biologically inhibiting” is meant partial or total growth inhibition as well as decreases in the rate of proliferation or growth of the cells. The biologically inhibitory dose may be determined by assessing the effects of the polynucleotides of the present invention on target malignant or abnormally proliferating cell growth in tissue culture, tumor growth in animals and cell cultures, or any other method known to one of ordinary skill in the art.

[0561] The present invention is further directed to antibody-based therapies which involve administering of anti-polypeptides and anti-polynucleotide antibodies to a mammalian, preferably human, patient for treating one or more of the described diseases, disorders, and/or conditions. Methods for producing anti-polypeptides and anti-polynucleotide antibodies polyclonal and monoclonal antibodies are described in detail elsewhere herein. Such antibodies may be provided in pharmaceutically acceptable compositions as known in the art or as described herein.

[0562] A summary of the ways in which the antibodies of the present invention may be used therapeutically includes binding polynucleotides or polypeptides of the present invention locally or systemically in the body or by direct cytotoxicity of the antibody, e.g., as mediated by complement (CDC) or by effector cells (ADCC). Some of these approaches are described in more detail below. Armed with the teachings provided herein, one of ordinary skill in the art will know how to use the antibodies of the present invention for diagnostic, monitoring or therapeutic purposes without undue experimentation.

[0563] In particular, the antibodies, fragments and derivatives of the present invention are useful for treating a subject having or developing cell proliferative and/or differentiation diseases, disorders, and/or conditions as described herein. Such treatment comprises administering a single or multiple doses of the antibody, or a fragment, derivative, or a conjugate thereof.

[0564] The antibodies of this invention may be advantageously utilized in combination with other monoclonal or chimeric antibodies, or with lymphokines or hematopoietic growth factors, for example, which serve to increase the number or activity of effector cells which interact with the antibodies.

[0565] It is preferred to use high affinity and/or potent in vivo inhibiting and/or neutralizing antibodies against polypeptides or polynucleotides of the present invention, fragments or regions thereof, for both immunoassays directed to and therapy of diseases, disorders, and/or conditions related to polynucleotides or polypeptides, including fragments thereof, of the present invention. Such antibodies, fragments, or regions, will preferably have an affinity for polynucleotides or polypeptides, including fragments thereof. Preferred binding affinities include those with a dissociation constant or Kd less than 5×10⁻⁶M, 10⁻⁶M, 5×10⁻⁷M, 10⁻⁷M, 5×10⁻⁸M, 10⁻⁸M, 5×10⁻⁹M, 10⁻⁹M, 5×10⁻¹⁰M, 10⁻¹⁰M, 5×10⁻¹¹M, 10⁻¹¹M, 5×10⁻¹²M, 10⁻¹²M, 5×10⁻¹³M, 10⁻¹³M, 5×10⁻¹⁴M, 10⁻¹⁴M, 5×10⁻¹⁵M, and 10⁻¹⁵M.

[0566] Moreover, prostate cancer antigen polypeptides of the present invention or fragments thereof, are useful in inhibiting the angiogenesis of proliferative cells or tissues, either alone, as a protein fusion, or in combination with other polypeptides directly or indirectly, as described elsewhere herein. In a most preferred embodiment, said anti-angiogenesis effect may be achieved indirectly, for example, through the inhibition of hematopoietic, tumor-specific cells, such as tumor-associated macrophages (see, e.g., Joseph I B, et al. J Natl Cancer Inst, 90(21):1648-53 (1998), which is hereby incorporated by reference). Antibodies directed to polypeptides or polynucleotides of the present invention may also result in inhibition of angiogenesis directly, or indirectly (see, e.g., Witte L, et al., Cancer Metastasis Rev. 17(2):155-61 (1998), which is hereby incorporated by reference)).

[0567] Polypeptides, including protein fusions, of the present invention, or fragments thereof may be useful in inhibiting proliferative cells or tissues through the induction of apoptosis. Said polypeptides may act either directly, or indirectly to induce apoptosis of proliferative cells and tissues, for example in the activation of a death-domain receptor, such as tumor necrosis factor (TNF) receptor-1, CD95 (Fas/APO-1), TNF-receptor-related apoptosis-mediated protein (TRAMP) and TNF-related apoptosis-inducing ligand (TRAIL) receptor-1 and -2 (see, e.g., Schulze-Osthoff K, et.al., Eur J Biochem 254(3):439-59 (1998), which is hereby incorporated by reference). Moreover, in another preferred embodiment of the present invention, said polypeptides may induce apoptosis through other mechanisms, such as in the activation of other proteins which will activate apoptosis, or through stimulating the expression of said proteins, either alone or in combination with small molecule drugs or adjuvants, such as apoptonin, galectins, thioredoxins, antiinflammatory proteins (See for example, Mutat. Res. 400(1-2):447-55 (1998), Med Hypotheses.50(5):423-33 (1998), Chem. Biol. Interact. Apr 24;111-112:23-34 (1998), J. Mo. Med. 76(6):402-12 (1998), Int. J. Tissue React. 20(1):3-15 (1998), which are all hereby incorporated by reference).

[0568] Polypeptides, including protein fusions to, or fragments thereof, of the present invention are useful in inhibiting the metastasis of proliferative cells or tissues. Inhibition may occur as a direct result of administering polypeptides, or antibodies directed to said polypeptides as described elsewhere herein, or indirectly, such as activating the expression of proteins known to inhibit metastasis, for example alpha 4 integrins, (See, e.g., Curr Top Microbiol Immunol 1998;231:125-41, which is hereby incorporated by reference). Such therapeutic affects of the present invention may be achieved either alone, or in combination with small molecule drugs or adjuvants.

[0569] In another embodiment, the invention provides a method of delivering compositions containing the polypeptides of the invention (e.g., compositions containing polypeptides or anti-prostate cancer antigen polypeptide antibodies associated with heterologous polypeptides, heterologous nucleic acids, toxins, or prodrugs) to targeted cells expressing the polypeptide of the present invention. prostate cancer antigen polypeptides or anti-prostate cancer antigen polypeptide antibodies of the invention may be associated with heterologous polypeptides, heterologous nucleic acids, toxins, or prodrugs via hydrophobic, hydrophilic, ionic and/or covalent interactions.

[0570] Polypeptides, protein fusions to, or fragments thereof, of the present invention are useful in enhancing the immunogenicity and/or antigenicity of proliferating cells or tissues, either directly, such as would occur if the polypeptides of the present invention ‘vaccinated’ the immune response to respond to proliferative antigens and immunogens, or indirectly, such as in activating the expression of proteins known to enhance the immune response (e.g. chemokines), to said antigens and immunogens.

[0571] Urinary System Disorders

[0572] Polynucleotides, polypeptides, antibodies, and/or agonists or antagonists of the present invention, may be used to treat, prevent, diagnose, and/or prognose disorders of the urinary system, including but not limited to disorders of the renal system, bladder, ureters, and urethra. Renal disorders include, but are not limited to, kidney failure, nephritis, blood vessel disorders of kidney, metabolic and congenital kidney disorders, urinary disorders of the kidney, autoimmune disorders, sclerosis and necrosis, electrolyte imbalance, and kidney cancers.

[0573] Kidney failure diseases include, but are not limited to, acute kidney failure, chronic kidney failure, atheroembolic renal failure, and end-stage renal disease. Inflammatory diseases of the kidney include acute glomerulonephritis, postinfectious glomerulonephritis, rapidly progressive glomerulonephritis, nephrotic syndrome, membranous glomerulonephritis, familial nephrotic syndrome, membranoproliferative glomerulonephritis I and II, mesangial proliferative glomerulonephritis, chronic glomerulonephritis, acute tubulointerstitial nephritis, chronic tubulointerstitial nephritis, acute post-streptococcal glomerulonephritis (PSGN), pyelonephritis, lupus nephritis, chronic nephritis, interstitial nephritis, and post-streptococcal glomerulonephritis.

[0574] Blood vessel disorders of the kidneys include, but are not limited to, kidney infarction, atheroembolic kidney disease, cortical necrosis, malignant nephrosclerosis, renal vein thrombosis, renal underperfusion, renal ischemia-reperfusion, renal artery embolism, and renal artery stenosis. Kidney disorders resulting form urinary tract problems include, but are not limited to, pyelonephritis, hydronephrosis, urolithiasis (renal lithiasis, nephrolithiasis), reflux nephropathy, urinary tract infections, urinary retention, and acute or chronic unilateral obstructive uropathy.

[0575] Metabolic and congenital disorders of the kidneys include, but are not limited to, renal tubular acidosis, renal glycosuria, nephrogenic diabetes insipidus, cystinuria, Fanconi's syndrome, vitamin D-resistant rickets, Hartnup disease, Bartter's syndrome, Liddle's syndrome, polycystic kidney disease, medullary cystic disease, medullary sponge kidney, Alport's syndrome, nail-patella syndrome, congenital nephrotic syndrome, CRUSH syndrome, horseshoe kidney, diabetic nephropathy, nephrogenic diabetes insipidus, analgesic nephropathy, kidney stones, and membranous nephropathy, Kidney disorders resulting from an autoimmune response include, but are not limited to, systemic lupus erythematosus (SLE), Goodpasture syndrome, IgA nephropathy, and IgM mesangial proliferative glomerulonephritis.

[0576] Sclerotic or necrotic disorders of the kidney include, but are not limited to, glomerulosclerosis, diabetic nephropathy, focal segmental glomerulosclerosis (FSGS), necrotizing glomerulonephritis, and renal papillary necrosis. Kidneys may also develop carcinomas, including, but not limited to, hypernephroma, nephroblastoma, renal cell cancer, transitional cell cancer, squamous cell cancer, and Wilm's tumor.

[0577] Kidney disorders may also result in electrolyte imbalances, including, but not limited to, nephrocalcinosis, pyuria, edema, hydronephritis, proteinuria, hyponatremia, hypernatremia, hypokalemia, hyperkalemia, hypocalcemia, hypercalcemia, hypophosphatemia, and hyperphosphatemia.

[0578] Bladder disorders include, but are not limited to, benign prostatic hyperplasia (BPH), interstitial cystitis (IC), prostatitis, proteinuria, urinary tract infections, urinary incontinence, urinary retention. Disorders of the ureters and urethra include, but are not limited to, acute or chronic unilateral obstructive uropathy. The bladder, ureters, and urethra may also develop carcinomas, including, but not limited to, superficial bladder canccer, invasive bladder cancer, carcinoma of the ureter, and urethra cancers.

[0579] Polypeptides may be administered using any method known in the art, including, but not limited to, direct needle injection at the delivery site, intravenous injection, topical administration, catheter infusion, biolistic injectors, particle accelerators, gelfoam sponge depots, other commercially available depot materials, osmotic pumps, oral or suppositorial solid pharmaceutical formulations, decanting or topical applications during surgery, aerosol delivery. Such methods are known in the art. Polypeptides may be administered as part of a Therapeutic, described in more detail below. Methods of delivering polynucleotides are described in more detail herein.

[0580] Cardiovascular Disorders

[0581] Polynucleotides or polypeptides, or agonists or antagonists of the present invention, may be used to treat, prevent, diagnose, and/or prognose cardiovascular disorders, including, but not limited to, peripheral artery disease, such as limb ischemia.

[0582] Cardiovascular disorders include cardiovascular abnormalities, such as arterio-arterial fistula, arteriovenous fistula, cerebral arteriovenous malformations, congenital heart defects, pulmonary atresia, and Scimitar Syndrome. Congenital heart defects include aortic coarctation, cor triatriatum, coronary vessel anomalies, crisscross heart, dextrocardia, patent ductus arteriosus, Ebstein's anomaly, Eisenmenger complex, hypoplastic left heart syndrome, levocardia, tetralogy of fallot, transposition of great vessels, double outlet right ventricle, tricuspid atresia, persistent truncus arteriosus, total anomalous pulmonary venous connection, hypoplastic left heart syndrome, and heart septal defects, such as aortopulmonary septal defect, endocardial cushion defects, Lutembacher's Syndrome, atrioventricular canal defect, trilogy of Fallot, ventricular heart septal defects.

[0583] Cardiovascular disorders also include heart disease, such as arrhythmias, carcinoid heart disease, high cardiac output, low cardiac output, cardiac tamponade, endocarditis (including bacterial), heart aneurysm, cardiac arrest, sudden cardiac death, congestive heart failure, congestive cardiomyopathy, paroxysmal dyspnea, cardiac edema, heart hypertrophy, congestive cardiomyopathy, left ventricular hypertrophy, right ventricular hypertrophy, post-infarction heart rupture, ventricular septal rupture, heart valve diseases, myocardial diseases, myocardial ischemia, pericardial effusion, pericarditis (including constrictive and tuberculous), pneumopericardium, postpericardiotomy syndrome, pulmonary heart disease, rheumatic heart disease, ventricular dysfunction, hyperemia, cardiovascular pregnancy complications, Scimitar Syndrome, diastolic dysfunction, enlarged heart, heart block, J-curve phenomenon, rheumatic heart disease, Marfan syndrome, cardiovascular syphilis, and cardiovascular tuberculosis.

[0584] Arrhythmias include sinus arrhythmia, atrial fibrillation, atrial flutter, bradycardia, extrasystole, Adams-Stokes Syndrome, bundle-branch block, sinoatrial block, long QT syndrome, parasystole, Lown-Ganong-Levine Syndrome, Mahaim-type pre-excitation syndrome, Wolff-Parkinson-White syndrome, sick sinus syndrome, tachycardias, and ventricular fibrillation. Tachycardias include paroxysmal tachycardia, supraventricular tachycardia, accelerated idioventricular rhythm, atrioventricular nodal reentry tachycardia, ectopic atrial tachycardia, ectopic junctional tachycardia, sinoatrial nodal reentry tachycardia, sinus tachycardia, Torsades de Pointes, and ventricular tachycardia.

[0585] Heart valve disease include aortic valve insufficiency, aortic valve stenosis, heart murmurs, aortic valve prolapse, mitral valve prolapse, tricuspid valve prolapse, mitral valve insufficiency, mitral valve stenosis, pulmonary atresia, pulmonary valve insufficiency, pulmonary valve stenosis, tricuspid atresia, tricuspid valve insufficiency, tricuspid valve stenosis, and bicuspid aortic valve.

[0586] Myocardial diseases include alcoholic cardiomyopathy, congestive cardiomyopathy, hypertrophic cardiomyopathy, aortic subvalvular stenosis, pulmonary subvalvular stenosis, restrictive cardiomyopathy, Chagas cardiomyopathy, endocardial fibroelastosis, endomyocardial fibrosis, Kearns Syndrome, Barth syndrome, myocardial reperfusion injury, and myocarditis.

[0587] Myocardial ischemias include coronary disease, such as angina pectoris, Prinzmetal's angina, unstable angina, coronary aneurysm, coronary arteriosclerosis, coronary thrombosis, coronary vasospasm, myocardial infarction and myocardial stunning.

[0588] Cardiovascular diseases also include vascular diseases such as aneurysms, angiodysplasia, angiomatosis, bacillary angiomatosis, Hippel-Lindau Disease, Klippel-Trenaunay-Weber Syndrome, Sturge-Weber Syndrome, angioneurotic edema, aortic diseases, Takayasu's Arteritis, aortitis, Leriche's Syndrome, arterial occlusive diseases, arteritis, enarteritis, polyarteritis nodosa, cerebrovascular disorders, diabetic angiopathies, diabetic retinopathy, embolisms, thrombosis, erythromelalgia, hemorrhoids, hepatic veno-occlusive disease, hypertension, hypotension (shock), ischemia, peripheral vascular diseases, phlebitis, superficial phlebitis, pulmonary veno-occlusive disease, chronic obstructive pulmonary disease, Buerger's disease, Raynaud's disease, CREST syndrome, retinal vein occlusion, Scimitar syndrome, superior vena cava syndrome, telangiectasia, atacia telangiectasia, hereditary hemorrhagic telangiectasia, deep vein thrombosis, varicocele, varicose veins, varicose ulcer, vasculitis, and venous insufficiency.

[0589] Aneurysms include dissecting aneurysms, false aneurysms, infected aneurysms, ruptured aneurysms, aortic aneurysms, cerebral aneurysms, coronary aneurysms, heart aneurysms, and iliac aneurysms.

[0590] Arterial occlusive diseases include arteriosclerosis, arteriolosclerosis, atherosclerosis, intermittent claudication, carotid stenosis, fibromuscular dysplasias, mesenteric vascular occlusion, Moyamoya disease, renal artery obstruction, retinal artery occlusion, and thromboangiitis obliterans.

[0591] Cerebrovascular disorders include carotid artery diseases, cerebral amyloid angiopathy, cerebral aneurysm, cerebral anoxia, cerebral arteriosclerosis, cerebral arteriovenous malformation, cerebral artery diseases, cerebral embolism and thrombosis, carotid artery thrombosis, sinus thrombosis, Wallenberg's syndrome, cerebral hemorrhage, epidural hematoma, subdural hematoma, subaraxhnoid hemorrhage, cerebral infarction, cerebral ischemia (including transient), subclavian steal syndrome, periventricular leukomalacia, vascular headache, cluster headache, migraine, and vertebrobasilar insufficiency.

[0592] Embolisms include air embolisms, amniotic fluid embolisms, cholesterol embolisms, blue toe syndrome, fat embolisms, pulmonary embolisms, and thromoboembolisms. Thrombosis include coronary thrombosis, hepatic vein thrombosis, deep vein thrombosis, retinal vein occlusion, carotid artery thrombosis, sinus thrombosis, Wallenberg's syndrome, and thrombophlebitis.

[0593] Ischemia includes cerebral ischemia, ischemic colitis, silent ischemia, compartment syndromes, anterior compartment syndrome, myocardial ischemia, reperfusion injuries, and peripheral limb ischemia. Vasculitis includes aortitis, arteritis, Behcet's Syndrome, Churg-Strauss Syndrome, mucocutaneous lymph node syndrome, thromboangiitis obliterans, hypersensitivity vasculitis, Schoenlein-Henoch purpura, allergic cutaneous vasculitis, and Wegener's granulomatosis.

[0594] Cardiovascular diseases can also occur due to electrolyte imbalances that include, but are not limited to hyponatremia, hypernatremia, hypokalemia, hyperkalemia, hypocalcemia, hypercalcemia, hypophosphatemia, and hyperphophatemia. Neoplasm and/or cancers of the cardiovascular system include, but are not limited to, myxomas, fibromas, and rhabdomyomas.

[0595] Polypeptides may be administered using any method known in the art, including, but not limited to, direct needle injection at the delivery site, intravenous injection, topical administration, catheter infusion, biolistic injectors, particle accelerators, gelfoam sponge depots, other commercially available depot materials, osmotic pumps, oral or suppositorial solid pharmaceutical formulations, decanting or topical applications during surgery, aerosol delivery. Such methods are known in the art. Polypeptides may be administered as part of a Therapeutic, described in more detail below. Methods of delivering polynucleotides are described in more detail herein.

[0596] Respiratory Disorders

[0597] Polynucleotides or polypeptides, or agonists or antagonists of the present invention may be used to treat, prevent, diagnose, and/or prognose diseases and/or disorders of the respiratory system.

[0598] Diseases and disorders of the respiratory system include, but are not limited to, nasal vestibulitis, nonallergic rhinitis (e.g., acute rhinitis, chronic rhinitis, atrophic rhinitis, vasomotor rhinitis), nasal polyps, and sinusitis, juvenile angiofibromas, cancer of the nose and juvenile papillomas, vocal cord polyps, nodules (singer's nodules), contact ulcers, vocal cord paralysis, laryngoceles, pharyngitis (e.g., viral and bacterial), tonsillitis, tonsillar cellulitis, parapharyngeal abscess, laryngitis, laryngoceles, and throat cancers (e.g., cancer of the nasopharynx, tonsil cancer, larynx cancer), lung cancer (e.g., squamous cell carcinoma, small cell (oat cell) carcinoma, large cell carcinoma, and adenocarcinoma), allergic disorders (eosinophilic pneumonia, hypersensitivity pneumonitis (e.g., extrinsic allergic alveolitis, allergic interstitial pneumonitis, organic dust pneumoconiosis, allergic bronchopulmonary aspergillosis, asthma, Wegener's granulomatosis (granulomatous vasculitis), Goodpasture's syndrome)), pneumonia (e.g., bacterial pneumonia (e.g., Streptococcus pneumoniae (pneumoncoccal pneumonia), Staphylococcus aureus (staphylococcal pneumonia), Gram-negative bacterial pneumonia (caused by, e.g., Klebsiella and Pseudomas spp.), Mycoplasma pneumoniae pneumonia, Hemophilus influenzae pneumonia, Legionella pneumophila (Legionnaires' disease), and Chlamydia psittaci (Psittacosis)), and viral pneumonia (e.g., influenza, chickenpox (varicella).

[0599] Additional diseases and disorders of the respiratory system include, but are not limited to bronchiolitis, polio (poliomyelitis), croup, respiratory syncytial viral infection, mumps, erythema infectiosum (fifth disease), roseola infantum, progressive rubella panencephalitis, german measles, and subacute sclerosing panencephalitis), fungal pneumonia (e.g., Histoplasmosis, Coccidioidomycosis, Blastomycosis, fungal infections in people with severely suppressed immune systems (e.g., cryptococcosis, caused by Cryptococcus neofonnans; aspergillosis, caused by Aspergillus spp.; candidiasis, caused by Candida; and mucormycosis)), Pneumocystis carinii (pneumocystis pneumonia), atypical pneumonias (e.g., Mycoplasma and Chlamydia spp.), opportunistic infection pneumonia, nosocomial pneumonia, chemical pneumonitis, and aspiration pneumonia, pleural disorders (e.g., pleurisy, pleural effusion, and pneumothorax (e.g., simple spontaneous pneumothorax, complicated spontaneous pneumothorax, tension pneumothorax)), obstructive airway diseases (e.g., asthma, chronic obstructive pulmonary disease (COPD), emphysema, chronic or acute bronchitis), occupational lung diseases (e.g., silicosis, black lung (coal workers' pneumoconiosis), asbestosis, berylliosis, occupational asthsma, byssinosis, and benign pneumoconioses), Infiltrative Lung Disease (e.g., pulmonary fibrosis (e.g., fibrosing alveolitis, usual interstitial pneumonia), idiopathic pulmonary fibrosis, desquamative interstitial pneumonia, lymphoid interstitial pneumonia, histiocytosis X (e.g., Letterer-Siwe disease, Hand-Schjiller-Christian disease, eosinophilic granuloma), idiopathic pulmonary hemosiderosis, sarcoidosis and pulmonary alveolar proteinosis), Acute respiratory distress syndrome (also called, e.g., adult respiratory distress syndrome), edema, pulmonary embolism, bronchitis (e.g., viral, bacterial), bronchiectasis, atelectasis, lung abscess (caused by, e.g., Staphylococcus aureus or Legionella pneumophila), and cystic fibrosis.

[0600] Anti-Angiogenesis Activity

[0601] The naturally occurring balance between endogenous stimulators and inhibitors of angiogenesis is one in which inhibitory influences predominate. Rastinejad et al., Cell 56:345-355 (1989). In those rare instances in which neovascularization occurs under normal physiological conditions, such as wound healing, organ regeneration, embryonic development, and female reproductive processes, angiogenesis is stringently regulated and spatially and temporally delimited. Under conditions of pathological angiogenesis such as that characterizing solid tumor growth, these regulatory controls fail. Unregulated angiogenesis becomes pathologic and sustains progression of many neoplastic and non-neoplastic diseases. A number of serious diseases are dominated by abnormal neovascularization including solid tumor growth and metastases, arthritis, some types of eye disorders, and psoriasis. See, e.g., reviews by Moses et al., Biotech. 9:630-634 (1991); Folkman et al., N. Engl. J. Med., 333:1757-1763 (1995); Auerbach et al., J. Microvasc. Res. 29:401-411 (1985); Folkman, Advances in Cancer Research, eds. Klein and Weinhouse, Academic Press, New York, pp. 175-203 (1985); Patz, Am. J. Opthalmol. 94:715-743 (1982); and Folkman et al., Science 221:719-725 (1983). In a number of pathological conditions, the process of angiogenesis contributes to the disease state. For example, significant data have accumulated which suggest that the growth of solid tumors is dependent on angiogenesis. Folkman and Klagsbrun, Science 235:442-447 (1987).

[0602] The polynucleotides encoding a polypeptide of the present invention may be administered along with other polynucleotides encoding an angiogenic protein. Examples of angiogenic proteins include, but are not limited to, acidic and basic fibroblast growth factors, VEGF-1, VEGF-2, VEGF-3, epidermal growth factor alpha and beta, platelet-derived endothelial cell growth factor, platelet-derived growth factor, tumor necrosis factor alpha, hepatocyte growth factor, insulin like growth factor, colony stimulating factor, macrophage colony stimulating factor, granulocyte/macrophage colony stimulating factor, and nitric oxide synthase.

[0603] The present invention provides for treatment of diseases or disorders associated with neovascularization by administration of the polynucleotides and/or polypeptides of the invention, as well as agonists or antagonists of the present invention. Malignant and metastatic conditions which can be treated with the polynucleotides and polypeptides, or agonists or antagonists of the invention include, but are not limited to, malignancies, solid tumors, and cancers described herein and otherwise known in the art (for a review of such disorders, see Fishman et al., Medicine, 2d Ed., J. B. Lippincott Co., Philadelphia (1985)). Thus, the present invention provides a method of treating an angiogenesis-related disease and/or disorder, comprising administering to an individual in need thereof a therapeutically effective amount of a polynucleotide, polypeptide, antagonist and/or agonist of the invention. For example, polynucleotides, polypeptides, antagonists and/or agonists may be utilized in a variety of additional methods in order to therapeutically treat a cancer or tumor. Cancers which may be treated with polynucleotides, polypeptides, antagonists and/or agonists include, but are not limited to solid tumors, including prostate, lung, breast, ovarian, stomach, pancreas, larynx, esophagus, testes, liver, parotid, biliary tract, colon, rectum, cervix, uterus, endometrium, kidney, bladder, thyroid cancer; primary tumors and metastases; melanomas; glioblastoma; Kaposi's sarcoma; leiomyosarcoma; non-small cell lung cancer; colorectal cancer; advanced malignancies; and blood born tumors such as leukemias. For example, polynucleotides, polypeptides, antagonists and/or agonists may be delivered topically, in order to treat cancers such as skin cancer, head and neck tumors, breast tumors, and Kaposi's sarcoma.

[0604] Within yet other aspects, polynucleotides, polypeptides, antagonists and/or agonists may be utilized to treat superficial forms of bladder cancer by, for example, intravesical administration. Polynucleotides, polypeptides, antagonists and/or agonists may be delivered directly into the tumor, or near the tumor site, via injection or a catheter. Of course, as the artisan of ordinary skill will appreciate, the appropriate mode of administration will vary according to the cancer to be treated. Other modes of delivery are discussed herein.

[0605] Polynucleotides, polypeptides, antagonists and/or agonists may be useful in treating other disorders, besides cancers, which involve angiogenesis. These disorders include, but are not limited to: benign tumors, for example hemangiomas, acoustic neuromas, neurofibromas, trachomas, and pyogenic granulomas; artheroscleric plaques; ocular angiogenic diseases, for example, diabetic retinopathy, retinopathy of prematurity, macular degeneration, corneal graft rejection, neovascular glaucoma, retrolental fibroplasia, rubeosis, retinoblastoma, uvietis and Pterygia (abnormal blood vessel growth) of the eye; rheumatoid arthritis; psoriasis; delayed wound healing; endometriosis; vasculogenesis; granulations; hypertrophic scars (keloids); nonunion fractures; scleroderma; trachoma; vascular adhesions; myocardial angiogenesis; coronary collaterals; cerebral collaterals; arteriovenous malformations; ischemic limb angiogenesis; Osler-Webber Syndrome; plaque neovascularization; telangiectasia; hemophiliac joints; angiofibroma; fibromuscular dysplasia; wound granulation; Crohn's disease; and atherosclerosis.

[0606] For example, within one aspect of the present invention methods are provided for treating hypertrophic scars and keloids, comprising the step of administering a polynucleotide, polypeptide, antagonist and/or agonist of the invention to a hypertrophic scar or keloid.

[0607] Within one embodiment of the present invention polynucleotides, polypeptides, antagonists and/or agonists are directly injected into a hypertrophic scar or keloid, in order to prevent the progression of these lesions. This therapy is of particular value in the prophylactic treatment of conditions which are known to result in the development of hypertrophic scars and keloids (e.g., burns), and is preferably initiated after the proliferative phase has had time to progress (approximately 14 days after the initial injury), but before hypertrophic scar or keloid development. As noted above, the present invention also provides methods for treating neovascular diseases of the eye, including for example, corneal neovascularization, neovascular glaucoma, proliferative diabetic retinopathy, retrolental fibroplasia and macular degeneration.

[0608] Moreover, Ocular disorders associated with neovascularization which can be treated with the polynucleotides and polypeptides of the present invention (including agonists and/or antagonists) include, but are not limited to: neovascular glaucoma, diabetic retinopathy, retinoblastoma, retrolental fibroplasia, uveitis, retinopathy of prematurity macular degeneration, corneal graft neovascularization, as well as other eye inflammatory diseases, ocular tumors and diseases associated with choroidal or iris neovascularization. See, e.g., reviews by Waltman et al., Am. J. Ophthal. 85:704-710 (1978) and Gartner et al., Surv. Ophthal. 22:291-312 (1978).

[0609] Thus, within one aspect of the present invention methods are provided for treating neovascular diseases of the eye such as corneal neovascularization (including corneal graft neovascularization), comprising the step of administering to a patient a therapeutically effective amount of a compound (as described above) to the cornea, such that the formation of blood vessels is inhibited. Briefly, the cornea is a tissue which normally lacks blood vessels. In certain pathological conditions however, capillaries may extend into the cornea from the pericorneal vascular plexus of the limbus. When the cornea becomes vascularized, it also becomes clouded, resulting in a decline in the patient's visual acuity. Visual loss may become complete if the cornea completely opacitates. A wide variety of disorders can result in corneal neovascularization, including for example, corneal infections (e.g., trachoma, herpes simplex keratitis, leishmaniasis and onchocerciasis), immunological processes (e.g., graft rejection and Stevens-Johnson's syndrome), alkali burns, trauma, inflammation (of any cause), toxic and nutritional deficiency states, and as a complication of wearing contact lenses.

[0610] Within particularly preferred embodiments of the invention, may be prepared for topical administration in saline (combined with any of the preservatives and antimicrobial agents commonly used in ocular preparations), and administered in eyedrop form. The solution or suspension may be prepared in its pure form and administered several times daily. Alternatively, anti-angiogenic compositions, prepared as described above, may also be administered directly to the cornea. Within preferred embodiments, the anti-angiogenic composition is prepared with a muco-adhesive polymer which binds to cornea. Within further embodiments, the anti-angiogenic factors or anti-angiogenic compositions may be utilized as an adjunct to conventional steroid therapy. Topical therapy may also be useful prophylactically in corneal lesions which are known to have a high probability of inducing an angiogenic response (such as chemical burns). In these instances the treatment, likely in combination with steroids, may be instituted immediately to help prevent subsequent complications.

[0611] Within other embodiments, the compounds described above may be injected directly into the corneal stroma by an ophthalmologist under microscopic guidance. The preferred site of injection may vary with the morphology of the individual lesion, but the goal of the administration would be to place the composition at the advancing front of the vasculature (i.e., interspersed between the blood vessels and the normal cornea). In most cases this would involve perilimbic corneal injection to “protect” the cornea from the advancing blood vessels. This method may also be utilized shortly after a corneal insult in order to prophylactically prevent corneal neovascularization. In this situation the material could be injected in the perilimbic cornea interspersed between the corneal lesion and its undesired potential limbic blood supply. Such methods may also be utilized in a similar fashion to prevent capillary invasion of transplanted corneas. In a sustained-release form injections might only be required 2-3 times per year. A steroid could also be added to the injection solution to reduce inflammation resulting from the injection itself.

[0612] Within another aspect of the present invention, methods are provided for treating neovascular glaucoma, comprising the step of administering to a patient a therapeutically effective amount of a polynucleotide, polypeptide, antagonist and/or agonist to the eye, such that the formation of blood vessels is inhibited. In one embodiment, the compound may be administered topically to the eye in order to treat early forms of neovascular glaucoma. Within other embodiments, the compound may be implanted by injection into the region of the anterior chamber angle. Within other embodiments, the compound may also be placed in any location such that the compound is continuously released into the aqueous humor. Within another aspect of the present invention, methods are provided for treating proliferative diabetic retinopathy, comprising the step of administering to a patient a therapeutically effective amount of a polynucleotide, polypeptide, antagonist and/or agonist to the eyes, such that the formation of blood vessels is inhibited.

[0613] Within particularly preferred embodiments of the invention, proliferative diabetic retinopathy may be treated by injection into the aqueous humor or the vitreous, in order to increase the local concentration of the polynucleotide, polypeptide, antagonist and/or agonist in the retina. Preferably, this treatment should be initiated prior to the acquisition of severe disease requiring photocoagulation.

[0614] Within another aspect of the present invention, methods are provided for treating retrolental fibroplasia, comprising the step of administering to a patient a therapeutically effective amount of a polynucleotide, polypeptide, antagonist and/or agonist to the eye, such that the formation of blood vessels is inhibited. The compound may be administered topically, via intravitreous injection and/or via intraocular implants.

[0615] Additionally, disorders which can be treated with the polynucleotides, polypeptides, agonists and/or agonists include, but are not limited to, hemangioma, arthritis, psoriasis, angiofibroma, atherosclerotic plaques, delayed wound healing, granulations, hemophilic joints, hypertrophic scars, nonunion fractures, Osler-Weber syndrome, pyogenic granuloma, scleroderma, trachoma, and vascular adhesions.

[0616] Moreover, disorders and/or states, which can be treated with be treated with the the polynucleotides, polypeptides, agonists and/or agonists include, but are not limited to, solid tumors, blood born tumors such as leukemias, tumor metastasis, Kaposi's sarcoma, benign tumors, for example hemangiomas, acoustic neuromas, neurofibromas, trachomas, and pyogenic granulomas, rheumatoid arthritis, psoriasis, ocular angiogenic diseases, for example, diabetic retinopathy, retinopathy of prematurity, macular degeneration, corneal graft rejection, neovascular glaucoma, retrolental fibroplasia, rubeosis, retinoblastoma, and uvietis, delayed wound healing, endometriosis, vascluogenesis, granulations, hypertrophic scars (keloids), nonunion fractures, scleroderma, trachoma, vascular adhesions, myocardial angiogenesis, coronary collaterals, cerebral collaterals, arteriovenous malformations, ischemic limb angiogenesis, Osler-Webber Syndrome, plaque neovascularization, telangiectasia, hemophiliac joints, angiofibroma fibromuscular dysplasia, wound granulation, Crohn's disease, atherosclerosis, birth control agent by preventing vascularization required for embryo implantation controlling menstruation, diseases that have angiogenesis as a pathologic consequence such as cat scratch disease (Rochele minalia quintosa), ulcers (Helicobacter pylori), Bartonellosis and bacillary angiomatosis.

[0617] In one aspect of the birth control method, an amount of the compound sufficient to block embryo implantation is administered before or after intercourse and fertilization have occurred, thus providing an effective method of birth control, possibly a “morning after” method. Polynucleotides, polypeptides, agonists and/or agonists may also be used in controlling menstruation or administered as either a peritoneal lavage fluid or for peritoneal implantation in the treatment of endometriosis.

[0618] Polynucleotides, polypeptides, agonists and/or agonists of the present invention may be incorporated into surgical sutures in order to prevent stitch granulomas.

[0619] Polynucleotides, polypeptides, agonists and/or agonists may be utilized in a wide variety of surgical procedures. For example, within one aspect of the present invention a compositions (in the form of, for example, a spray or film) may be utilized to coat or spray an area prior to removal of a tumor, in order to isolate normal surrounding tissues from malignant tissue, and/or to prevent the spread of disease to surrounding tissues. Within other aspects of the present invention, compositions (e.g., in the form of a spray) may be delivered via endoscopic procedures in order to coat tumors, or inhibit angiogenesis in a desired locale. Within yet other aspects of the present invention, surgical meshes which have been coated with anti-angiogenic compositions of the present invention may be utilized in any procedure wherein a surgical mesh might be utilized. For example, within one embodiment of the invention a surgical mesh laden with an anti-angiogenic composition may be utilized during abdominal cancer resection surgery (e.g., subsequent to colon resection) in order to provide support to the structure, and to release an amount of the anti-angiogenic factor.

[0620] Within further aspects of the present invention, methods are provided for treating tumor excision sites, comprising administering a polynucleotide, polypeptide, agonist and/or agonist to the resection margins of a tumor subsequent to excision, such that the local recurrence of cancer and the formation of new blood vessels at the site is inhibited. Within one embodiment of the invention, the anti-angiogenic compound is administered directly to the tumor excision site (e.g., applied by swabbing, brushing or otherwise coating the resection margins of the tumor with the anti-angiogenic compound). Alternatively, the anti-angiogenic compounds may be incorporated into known surgical pastes prior to administration. Within particularly preferred embodiments of the invention, the anti-angiogenic compounds are applied after hepatic resections for malignancy, and after neurosurgical operations.

[0621] Within one aspect of the present invention, polynucleotides, polypeptides, agonists and/or agonists may be administered to the resection margin of a wide variety of tumors, including for example, breast, colon, brain and hepatic tumors. For example, within one embodiment of the invention, anti-angiogenic compounds may be administered to the site of a neurological tumor subsequent to excision, such that the formation of new blood vessels at the site are inhibited.

[0622] The polynucleotides, polypeptides, agonists and/or agonists of the present invention may also be administered along with other anti-angiogenic factors. Representative examples of other anti-angiogenic factors include: Anti-Invasive Factor, retinoic acid and derivatives thereof, paclitaxel, Suramin, Tissue Inhibitor of Metalloproteinase-1, Tissue Inhibitor of Metalloproteinase-2, Plasminogen Activator Inhibitor-1, Plasminogen Activator Inhibitor-2, and various forms of the lighter “d group” transition metals.

[0623] Lighter “d group” transition metals include, for example, vanadium, molybdenum, tungsten, titanium, niobium, and tantalum species. Such transition metal species may form transition metal complexes. Suitable complexes of the above-mentioned transition metal species include oxo transition metal complexes.

[0624] Representative examples of vanadium complexes include oxo vanadium complexes such as vanadate and vanadyl complexes. Suitable vanadate complexes include metavanadate and orthovanadate complexes such as, for example, ammonium metavanadate, sodium metavanadate, and sodium orthovanadate. Suitable vanadyl complexes include, for example, vanadyl acetylacetonate and vanadyl sulfate including vanadyl sulfate hydrates such as vanadyl sulfate mono- and trihydrates.

[0625] Representative examples of tungsten and molybdenum complexes also include oxo complexes. Suitable oxo tungsten complexes include tungstate and tungsten oxide complexes. Suitable tungstate complexes include ammonium tungstate, calcium tungstate, sodium tungstate dihydrate, and tungstic acid. Suitable tungsten oxides include tungsten (IV) oxide and tungsten (VI) oxide. Suitable oxo molybdenum complexes include molybdate, molybdenum oxide, and molybdenyl complexes. Suitable molybdate complexes include ammonium molybdate and its hydrates, sodium molybdate and its hydrates, and potassium molybdate and its hydrates. Suitable molybdenum oxides include molybdenum (VI) oxide, molybdenum (VI) oxide, and molybdic acid. Suitable molybdenyl complexes include, for example, molybdenyl acetylacetonate. Other suitable tungsten and molybdenum complexes include hydroxo derivatives derived from, for example, glycerol, tartaric acid, and sugars.

[0626] A wide variety of other anti-angiogenic factors may also be utilized within the context of the present invention. Representative examples include platelet factor 4; protamine sulphate; sulphated chitin derivatives (prepared from queen crab shells), (Murata et al., Cancer Res. 51:22-26, 1991); Sulphated Polysaccharide Peptidoglycan Complex (SP-PG) (the function of this compound may be enhanced by the presence of steroids such as estrogen, and tamoxifen citrate); Staurosporine; modulators of matrix metabolism, including for example, proline analogs, cishydroxyproline, d,L-3,4-dehydroproline, Thiaproline, alpha,alpha-dipyridyl, aminopropionitrile fumarate; 4-propyl-5-(4-pyridinyl)-2(3H)-oxazolone; Methotrexate; Mitoxantrone; Heparin; Interferons; 2 Macroglobulin-serum; ChIMP-3 (Pavloff et al., J. Bio. Chem. 267:17321-17326, 1992); Chymostatin (Tomkinson et al., Biochem J. 286:475-480, 1992); Cyclodextrin Tetradecasulfate; Eponemycin; Camptothecin; Fumagillin (Ingber et al., Nature 348:555-557, 1990); Gold Sodium Thiomalate (“GST”; Matsubara and Ziff, J. Clin. Invest. 79:1440-1446, 1987); anticollagenase-serum; alpha2-antiplasmin (Holmes et al., J. Biol. Chem. 262(4):1659-1664, 1987); Bisantrene (National Cancer Institute); Lobenzarit disodium (N-(2)-carboxyphenyl-4-chloroanthronilic acid disodium or “CCA”; Takeuchi et al., Agents Actions 36:312-316, 1992); Thalidomide; Angostatic steroid; AGM-1470; carboxynaminolmidazole; and metalloproteinase inhibitors such as BB94.

[0627] Musculoskeletal System Disorders

[0628] Polynucleotides, polypeptides, antibodies, and/or agonists or antagonists of the present invention, may be used to treat, prevent, diagnose, and/or prognose disorders of the musculoskeletal system, including but not limited to, disorders of the bone, joints, ligaments, tendons, bursa, muscle, and/or neoplasms and cancers associated with musculoskeletal tissue.

[0629] Diseases or disorders of the bone include, but are not limited to, Albers-Schönberg disease, bowlegs, heel spurs, Köhler's bone disease, knock-knees, Legg-Calvé-Perthes disease, Marfan's syndrome, mucopolysaccharidoses, Osgood-Schlatter disease, osteochondroses, osteochondrodysplasia, osteomyelitis, osteopetroses, osteoporosis (postmenopausal, senile, and juvenile), Paget's disease, Scheuermann's disease, scoliosis, Sever's disease, and patellofemoral stress syndrome.

[0630] Joint diseases or disorders include, but are not limited to, ankylosing spondylitis, Behcet's syndrome, CREST syndrome, Ehlers-Danlos syndrome, infectious arthritis, discoid lupus erythematosus, systemic lupus erythematosus, Lyme disease, osteoarthritis, psoriatic arthritis, relapsing polychondrites, Reiter's syndrome, rheumatoid arthritis (adult and juvenile), scleroderma, and Still's disease.

[0631] Diseases or disorders affecting ligaments, tendons, or bursa include, but are not limited to, ankle sprain, bursitis, posterior Achilles tendon bursitis (Haglund's deformity), anterior Achilles tendon bursitis (Albert's disease), tendinitis, tenosynovitis, poplieus tendinitis, Achilles tendinitis, medial or lateral epicondylitis, rotator cuff tendinitis, spasmodic torticollis, and fibromyalgia syndrome.

[0632] Muscle diseases or disorders include, but are not limited to, Becker's muscular dystrophy, Duchenne's muscular dystrophy, Landouzy-Dejerine muscular dystrophy, Leyden-Möbius muscular dystrophy, Erb's muscular dystrophy, Charcot's joints, dermatomyositis, gout, pseudogout, glycogen storage diseases, Pompe's disease, mitochondrial myopathy, periodic paralysis, polymyalgia rheumatica, polymyositis, Steinert's disease, Thomsen's disease, anterolateral and posteromedial shin splints, posterior femoral muscle strain, and fibromyositis.

[0633] Musculoskeletal tissue may also develop cancers and/or neoplasms that include, but are not limited to, osteochondroma, benign chondroma, chondroblastoma, chondromyxoid fibroma, osteoid osteoma, giant cell tumor, multiple myeloma, osteosarcoma, fibrosarcoma, malignant fibrous histiocytoma, chondrosarcoma, Ewing's tumor, and malignant lymphoma of bone.

[0634] Neural Activity and Neurological Diseases

[0635] The polynucleotides, polypeptides and agonists or antagonists of the invention may be used for the diagnosis and/or treatment of diseases, disorders, damage or injury of the brain and/or nervous system. Nervous system disorders that can be treated with the compositions of the invention (e.g., polypeptides, polynucleotides, and/or agonists or antagonists), include, but are not limited to, nervous system injuries, and diseases or disorders which result in either a disconnection of axons, a diminution or degeneration of neurons, or demyelination. Nervous system lesions which may be treated in a patient (including human and non-human mammalian patients) according to the methods of the invention, include but are not limited to, the following lesions of either the central (including spinal cord, brain) or peripheral nervous systems: (1) ischemic lesions, in which a lack of oxygen in a portion of the nervous system results in neuronal injury or death, including cerebral infarction or ischemia, or spinal cord infarction or ischemia; (2) traumatic lesions, including lesions caused by physical injury or associated with surgery, for example, lesions which sever a portion of the nervous system, or compression injuries; (3) malignant lesions, in which a portion of the nervous system is destroyed or injured by malignant tissue which is either a nervous system associated malignancy or a malignancy derived from non-nervous system tissue; (4) infectious lesions, in which a portion of the nervous system is destroyed or injured as a result of infection, for example, by an abscess or associated with infection by human immunodeficiency virus, herpes zoster, or herpes simplex virus or with Lyme disease, tuberculosis, or syphilis; (5) degenerative lesions, in which a portion of the nervous system is destroyed or injured as a result of a degenerative process including but not limited to, degeneration associated with Parkinson's disease, Alzheimer's disease, Huntington's chorea, or amyotrophic lateral sclerosis (ALS); (6) lesions associated with nutritional diseases or disorders, in which a portion of the nervous system is destroyed or injured by a nutritional disorder or disorder of metabolism including, but not limited to, vitamin B12 deficiency, folic acid deficiency, Wernicke disease, tobacco-alcohol amblyopia, Marchiafava-Bignami disease (primary degeneration of the corpus callosum), and alcoholic cerebellar degeneration; (7) neurological lesions associated with systemic diseases including, but not limited to, diabetes (diabetic neuropathy, Bell's palsy), systemic lupus erythematosus, carcinoma, or sarcoidosis; (8) lesions caused by toxic substances including alcohol, lead, or particular neurotoxins; and (9) demyelinated lesions in which a portion of the nervous system is destroyed or injured by a demyelinating disease including, but not limited to, multiple sclerosis, human immunodeficiency virus-associated myelopathy, transverse myelopathy or various etiologies, progressive multifocal leukoencephalopathy, and central pontine myelinolysis.

[0636] In one embodiment, the polypeptides, polynucleotides, or agonists or antagonists of the invention are used to protect neural cells from the damaging effects of hypoxia. In a further preferred embodiment, the polypeptides, polynucleotides, or agonists or antagonists of the invention are used to protect neural cells from the damaging effects of cerebral hypoxia. According to this embodiment, the compositions of the invention are used to treat or prevent neural cell injury associated with cerebral hypoxia. In one non-exclusive aspect of this embodiment, the polypeptides, polynucleotides, or agonists or antagonists of the invention, are used to treat or prevent neural cell injury associated with cerebral ischemia. In another non-exclusive aspect of this embodiment, the polypeptides, polynucleotides, or agonists or antagonists of the invention are used to treat or prevent neural cell injury associated with cerebral infarction.

[0637] In another preferred embodiment, the polypeptides, polynucleotides, or agonists or antagonists of the invention are used to treat or prevent neural cell injury associated with a stroke. In a specific embodiment, the polypeptides, polynucleotides, or agonists or antagonists of the invention are used to treat or prevent cerebral neural cell injury associated with a stroke.

[0638] In another preferred embodiment, the polypeptides, polynucleotides, or agonists or antagonists of the invention are used to treat or prevent neural cell injury associated with a heart attack. In a specific embodiment, the polypeptides, polynucleotides, or agonists or antagonists of the invention are used to treat or prevent cerebral neural cell injury associated with a heart attack.

[0639] The compositions of the invention which are useful for treating or preventing a nervous system disorder may be selected by testing for biological activity in promoting the survival or differentiation of neurons. For example, and not by way of limitation, compositions of the invention which elicit any of the following effects may be useful according to the invention: (1) increased survival time of neurons in culture either in the presence or absence of hypoxia or hypoxic conditions; (2) increased sprouting of neurons in culture or in vivo; (3) increased production of a neuron-associated molecule in culture or in vivo, e.g., choline acetyltransferase or acetylcholinesterase with respect to motor neurons; or (4) decreased symptoms of neuron dysfunction in vivo. Such effects may be measured by any method known in the art. In preferred, non-limiting embodiments, increased survival of neurons may routinely be measured using a method set forth herein or otherwise known in the art, such as, for example, in Zhang et al., Proc Natl Acad Sci USA 97:3637-42 (2000) or in Arakawa et al., J. Neurosci., 10:3507-15 (1990); increased sprouting of neurons may be detected by methods known in the art, such as, for example, the methods set forth in Pestronk et al., Exp. Neurol., 70:65-82 (1980), or Brown et al., Ann. Rev. Neurosci., 4:17-42 (1981); increased production of neuron-associated molecules may be measured by bioassay, enzymatic assay, antibody binding, Northern blot assay, etc., using techniques known in the art and depending on the molecule to be measured; and motor neuron dysfunction may be measured by assessing the physical manifestation of motor neuron disorder, e.g., weakness, motor neuron conduction velocity, or functional disability.

[0640] In specific embodiments, motor neuron disorders that may be treated according to the invention include, but are not limited to, disorders such as infarction, infection, exposure to toxin, trauma, surgical damage, degenerative disease or malignancy that may affect motor neurons as well as other components of the nervous system, as well as disorders that selectively affect neurons such as amyotrophic lateral sclerosis, and including, but not limited to, progressive spinal muscular atrophy, progressive bulbar palsy, primary lateral sclerosis, infantile and juvenile muscular atrophy, progressive bulbar paralysis of childhood (Fazio-Londe syndrome), poliomyelitis and the post polio syndrome, and Hereditary Motorsensory Neuropathy (Charcot-Marie-Tooth Disease).

[0641] Further, polypeptides or polynucleotides of the invention may play a role in neuronal survival; synapse formation; conductance; neural differentiation, etc. Thus, compositions of the invention (including polynucleotides, polypeptides, and agonists or antagonists) may be used to diagnose and/or treat or prevent diseases or disorders associated with these roles, including, but not limited to, learning and/or cognition disorders. The compositions of the invention may also be useful in the treatment or prevention of neurodegenerative disease states and/or behavioural disorders. Such neurodegenerative disease states and/or behavioral disorders include, but are not limited to, Alzheimer's Disease, Parkinson's Disease, Huntington's Disease, Tourette Syndrome, schizophrenia, mania, dementia, paranoia, obsessive compulsive disorder, panic disorder, learning disabilities, ALS, psychoses, autism, and altered behaviors, including disorders in feeding, sleep patterns, balance, and perception. In addition, compositions of the invention may also play a role in the treatment, prevention and/or detection of developmental disorders associated with the developing embryo, or sexually-linked disorders.

[0642] Additionally, polypeptides, polynucleotides and/or agonists or antagonists of the invention, may be useful in protecting neural cells from diseases, damage, disorders, or injury, associated with cerebrovascular disorders including, but not limited to, carotid artery diseases (e.g., carotid artery thrombosis, carotid stenosis, or Moyamoya Disease), cerebral amyloid angiopathy, cerebral aneurysm, cerebral anoxia, cerebral arteriosclerosis, cerebral arteriovenous malformations, cerebral artery diseases, cerebral embolism and thrombosis (e.g., carotid artery thrombosis, sinus thrombosis, or Wallenberg's Syndrome), cerebral hemorrhage (e.g., epidural or subdural hematoma, or subarachnoid hemorrhage), cerebral infarction, cerebral ischemia (e.g., transient cerebral ischemia, Subclavian Steal Syndrome, or vertebrobasilar insufficiency), vascular dementia (e.g., multi-infarct), leukomalacia, periventricular, and vascular headache (e.g., cluster headache or migraines).

[0643] In accordance with yet a further aspect of the present invention, there is provided a process for utilizing polynucleotides or polypeptides, as well as agonists or antagonists of the present invention, for therapeutic purposes, for example, to stimulate neurological cell proliferation and/or differentiation. Therefore, polynucleotides, polypeptides, agonists and/or antagonists of the invention may be used to treat and/or detect neurologic diseases. Moreover, polynucleotides or polypeptides, or agonists or antagonists of the invention, can be used as a marker or detector of a particular nervous system disease or disorder.

[0644] Examples of neurologic diseases which can be treated or detected with polynucleotides, polypeptides, agonists, and/or antagonists of the present invention include brain diseases, such as metabolic brain diseases which includes phenylketonuria such as maternal phenylketonuria, pyruvate carboxylase deficiency, pyruvate dehydrogenase complex deficiency, Wernicke's Encephalopathy, brain edema, brain neoplasms such as cerebellar neoplasms which include infratentorial neoplasms, cerebral ventricle neoplasms such as choroid plexus neoplasms, hypothalamic neoplasms, supratentorial neoplasms, canavan disease, cerebellar diseases such as cerebellar ataxia which include spinocerebellar degeneration such as ataxia telangiectasia, cerebellar dyssynergia, Friederich's Ataxia, Machado-Joseph Disease, olivopontocerebellar atrophy, cerebellar neoplasms such as infratentorial neoplasms, diffuse cerebral sclerosis such as encephalitis periaxialis, globoid cell leukodystrophy, metachromatic leukodystrophy and subacute sclerosing panencephalitis.

[0645] Additional neurologic diseases which can be treated or detected with polynucleotides, polypeptides, agonists, and/or antagonists of the present invention include cerebrovascular disorders (such as carotid artery diseases which include carotid artery thrombosis, carotid stenosis and Moyamoya Disease), cerebral amyloid angiopathy, cerebral aneurysm, cerebral anoxia, cerebral arteriosclerosis, cerebral arteriovenous malformations, cerebral artery diseases, cerebral embolism and thrombosis such as carotid artery thrombosis, sinus thrombosis and Wallenberg's Syndrome, cerebral hemorrhage such as epidural hematoma, subdural hematoma and subarachnoid hemorrhage, cerebral infarction, cerebral ischemia such as transient cerebral ischemia, Subclavian Steal Syndrome and vertebrobasilar insufficiency, vascular dementia such as multi-infarct dementia, periventricular leukomalacia, vascular headache such as cluster headache and migraine.

[0646] Additional neurologic diseases which can be treated or detected with polynucleotides, polypeptides, agonists, and/or antagonists of the present invention include dementia such as AIDS Dementia Complex, presenile dementia such as Alzheimer's Disease and Creutzfeldt-Jakob Syndrome, senile dementia such as Alzheimer's Disease and progressive supranuclear palsy, vascular dementia such as multi-infarct dementia, encephalitis which include encephalitis periaxialis, viral encephalitis such as epidemic encephalitis, Japanese Encephalitis, St. Louis Encephalitis, tick-borne encephalitis and West Nile Fever, acute disseminated encephalomyelitis, meningoencephalitis such as uveomeningoencephalitic syndrome, Postencephalitic Parkinson Disease and subacute sclerosing panencephalitis, encephalomalacia such as periventricular leukomalacia, epilepsy such as generalized epilepsy which includes infantile spasms, absence epilepsy, myoclonic epilepsy which includes MERRF Syndrome, tonic-clonic epilepsy, partial epilepsy such as complex partial epilepsy, frontal lobe epilepsy and temporal lobe epilepsy, post-traumatic epilepsy, status epilepticus such as Epilepsia Partialis Continua, and Hallervorden-Spatz Syndrome.

[0647] Additional neurologic diseases which can be treated or detected with polynucleotides, polypeptides, agonists, and/or antagonists of the present invention include hydrocephalus such as Dandy-Walker Syndrome and normal pressure hydrocephalus, hypothalamic diseases such as hypothalamic neoplasms, cerebral malaria, narcolepsy which includes cataplexy, bulbar poliomyelitis, cerebri pseudotumor, Rett Syndrome, Reye's Syndrome, thalamic diseases, cerebral toxoplasmosis, intracranial tuberculoma and Zellweger Syndrome, central nervous system infections such as AIDS Dementia Complex, Brain Abscess, subdural empyema, encephalomyelitis such as Equine Encephalomyelitis, Venezuelan Equine Encephalomyelitis, Necrotizing Hemorrhagic Encephalomyelitis, Visna, and cerebral malaria.

[0648] Additional neurologic diseases which can be treated or detected with polynucleotides, polypeptides, agonists, and/or antagonists of the present invention include meningitis such as arachnoiditis, aseptic meningtitis such as viral meningtitis which includes lymphocytic choriomeningitis, Bacterial meningtitis which includes Haemophilus Meningtitis, Listeria Meningtitis, Meningococcal Meningtitis such as Waterhouse-Friderichsen Syndrome, Pneumococcal Meningtitis and meningeal tuberculosis, fungal meningitis such as Cryptococcal Meningtitis, subdural effusion, meningoencephalitis such as uvemeningoencephalitic syndrome, myelitis such as transverse myelitis, neurosyphilis such as tabes dorsalis, poliomyelitis which includes bulbar poliomyelitis and postpoliomyelitis syndrome, prion diseases (such as Creutzfeldt-Jakob Syndrome, Bovine Spongiform Encephalopathy, Gerstmann-Straussler Syndrome, Kuru, Scrapie), and cerebral toxoplasmosis.

[0649] Additional neurologic diseases which can be treated or detected with polynucleotides, polypeptides, agonists, and/or antagonists of the present invention include central nervous system neoplasms such as brain neoplasms that include cerebellar neoplasms such as infratentorial neoplasms, cerebral ventricle neoplasms such as choroid plexus neoplasms, hypothalamic neoplasms and supratentorial neoplasms, meningeal neoplasms, spinal cord neoplasms which include epidural neoplasms, demyelinating diseases such as Canavan Diseases, diffuse cerebral sceloris which includes adrenoleukodystrophy, encephalitis periaxialis, globoid cell leukodystrophy, diffuse cerebral sclerosis such as metachromatic leukodystrophy, allergic encephalomyelitis, necrotizing hemorrhagic encephalomyelitis, progressive multifocal leukoencephalopathy, multiple sclerosis, central pontine myelinolysis, transverse myelitis, neuromyelitis optica, Scrapie, Swayback, Chronic Fatigue Syndrome, Visna, High Pressure Nervous Syndrome, Meningism, spinal cord diseases such as amyotonia congenita, amyotrophic lateral sclerosis, spinal muscular atrophy such as Werdnig-Hoffmann Disease, spinal cord compression, spinal cord neoplasms such as epidural neoplasms, syringomyelia, Tabes Dorsalis, Stiff-Man Syndrome, mental retardation such as Angelman Syndrome, Cri-du-Chat Syndrome, De Lange's Syndrome, Down Syndrome, Gangliosidoses such as gangliosidoses G(M1), Sandhoff Disease, Tay-Sachs Disease, Hartnup Disease, homocystinuria, Laurence-Moon-Biedl Syndrome, Lesch-Nyhan Syndrome, Maple Syrup Urine Disease, mucolipidosis such as fucosidosis, neuronal ceroid-lipofuscinosis, oculocerebrorenal syndrome, phenylketonuria such as maternal phenylketonuria, Prader-Willi Syndrome, Rett Syndrome, Rubinstein-Taybi Syndrome, Tuberous Sclerosis, WAGR Syndrome, nervous system abnormalities such as holoprosencephaly, neural tube defects such as anencephaly which includes hydrangencephaly, Arnold-Chairi Deformity, encephalocele, meningocele, meningomyelocele, spinal dysraphism such as spina bifida cystica and spina bifida occulta.

[0650] Additional neurologic diseases which can be treated or detected with polynucleotides, polypeptides, agonists, and/or antagonists of the present invention include hereditary motor and sensory neuropathies which include Charcot-Marie Disease, Hereditary optic atrophy, Refsum's Disease, hereditary spastic paraplegia, Werdnig-Hoffmann Disease, Hereditary Sensory and Autonomic Neuropathies such as Congenital Analgesia and Familial Dysautonomia, Neurologic manifestations (such as agnosia that include Gerstmann's Syndrome, Amnesia such as retrograde amnesia, apraxia, neurogenic bladder, cataplexy, communicative disorders such as hearing disorders that includes deafness, partial hearing loss, loudness recruitment and tinnitus, language disorders such as aphasia which include agraphia, anomia, broca aphasia, and Wernicke Aphasia, Dyslexia such as Acquired Dyslexia, language development disorders, speech disorders such as aphasia which includes anomia, broca aphasia and Wernicke Aphasia, articulation disorders, communicative disorders such as speech disorders which include dysarthria, echolalia, mutism and stuttering, voice disorders such as aphonia and hoarseness, decerebrate state, delirium, fasciculation, hallucinations, meningism, movement disorders such as angelman syndrome, ataxia, athetosis, chorea, dystonia, hypokinesia, muscle hypotonia, myoclonus, tic, torticollis and tremor, muscle hypertonia such as muscle rigidity such as stiff-man syndrome, muscle spasticity, paralysis such as facial paralysis which includes Herpes Zoster Oticus, Gastroparesis, Hemiplegia, ophthalmoplegia such as diplopia, Duane's Syndrome, Homer's Syndrome, Chronic progressive external ophthalmoplegia such as Kearns Syndrome, Bulbar Paralysis, Tropical Spastic Paraparesis, Paraplegia such as Brown-Sequard Syndrome, quadriplegia, respiratory paralysis and vocal cord paralysis, paresis, phantom limb, taste disorders such as ageusia and dysgeusia, vision disorders such as amblyopia, blindness, color vision defects, diplopia, hemianopsia, scotoma and subnormal vision, sleep disorders such as hypersomnia which includes Kleine-Levin Syndrome, insomnia, and somnambulism, spasm such as trismus, unconsciousness such as coma, persistent vegetative state and syncope and vertigo, neuromuscular diseases such as amyotonia congenita, amyotrophic lateral sclerosis, Lambert-Eaton Myasthenic Syndrome, motor neuron disease, muscular atrophy such as spinal muscular atrophy, Charcot-Marie Disease and Werdnig-Hoffmann Disease, Postpoliomyelitis Syndrome, Muscular Dystrophy, Myasthenia Gravis, Myotonia Atrophica, Myotonia Confenita, Nemaline Myopathy, Familial Periodic Paralysis, Multiplex Paramyloclonus, Tropical Spastic Paraparesis and Stiff-Man Syndrome, peripheral nervous system diseases such as acrodynia, amyloid neuropathies, autonomic nervous system diseases such as Adie's Syndrome, Barre-Lieou Syndrome, Familial Dysautonomia, Homer's Syndrome, Reflex Sympathetic Dystrophy and Shy-Drager Syndrome, Cranial Nerve Diseases such as Acoustic Nerve Diseases such as Acoustic Neuroma which includes Neurofibromatosis 2, Facial Nerve Diseases such as Facial Neuralgia, Melkersson-Rosenthal Syndrome, ocular motility disorders which includes amblyopia, nystagmus, oculomotor nerve paralysis, ophthalmoplegia such as Duane's Syndrome, Homer's Syndrome, Chronic Progressive External Ophthalmoplegia which includes Kearns Syndrome, Strabismus such as Esotropia and Exotropia, Oculomotor Nerve Paralysis, Optic Nerve Diseases such as Optic Atrophy which includes Hereditary Optic Atrophy, Optic Disk Drusen, Optic Neuritis such as Neuromyelitis Optica, Papilledema, Trigeminal Neuralgia, Vocal Cord Paralysis, Demyelinating Diseases such as Neuromyelitis Optica and Swayback, and Diabetic neuropathies such as diabetic foot.

[0651] Additional neurologic diseases which can be treated or detected with polynucleotides, polypeptides, agonists, and/or antagonists of the present invention include nerve compression syndromes such as carpal tunnel syndrome, tarsal tunnel syndrome, thoracic outlet syndrome such as cervical rib syndrome, ulnar nerve compression syndrome, neuralgia such as causalgia, cervico-brachial neuralgia, facial neuralgia and trigeminal neuralgia, neuritis such as experimental allergic neuritis, optic neuritis, polyneuritis, polyradiculoneuritis and radiculities such as polyradiculitis, hereditary motor and sensory neuropathies such as Charcot-Marie Disease, Hereditary Optic Atrophy, Refsum's Disease, Hereditary Spastic Paraplegia and Werdnig-Hoffmann Disease, Hereditary Sensory and Autonomic Neuropathies which include Congenital Analgesia and Familial Dysautonomia, POEMS Syndrome, Sciatica, Gustatory Sweating and Tetany).

[0652] Endocrine Disorders

[0653] Polynucleotides or polypeptides, or agonists or antagonists of the present invention, may be used to treat, prevent, diagnose, and/or prognose disorders and/or diseases related to hormone imbalance, and/or disorders or diseases of the endocrine system.

[0654] Hormones secreted by the glands of the endocrine system control physical growth, sexual function, metabolism, and other functions. Disorders may be classified in two ways: disturbances in the production of hormones, and the inability of tissues to respond to hormones. The etiology of these hormone imbalance or endocrine system diseases, disorders or conditions may be genetic, somatic, such as cancer and some autoimmune diseases, acquired (e.g., by chemotherapy, injury or toxins), or infectious. Moreover, polynucleotides, polypeptides, antibodies, and/or agonists or antagonists of the present invention can be used as a marker or detector of a particular disease or disorder related to the endocrine system and/or hormone imbalance.

[0655] Endocrine system and/or hormone imbalance and/or diseases encompass disorders of uterine motility including, but not limited to: complications with pregnancy and labor (e.g., pre-term labor, post-term pregnancy, spontaneous abortion, and slow or stopped labor); and disorders and/or diseases of the menstrual cycle (e.g., dysmenorrhea and endometriosis).

[0656] Endocrine system and/or hormone imbalance disorders and/or diseases include disorders and/or diseases of the pancreas, such as, for example, diabetes mellitus, diabetes insipidus, congenital pancreatic agenesis, pheochromocytoma-islet cell tumor syndrome; disorders and/or diseases of the adrenal glands such as, for example, Addison's Disease, corticosteroid deficiency, virilizing disease, hirsutism, Cushing's Syndrome, hyperaldosteronism, pheochromocytoma; disorders and/or diseases of the pituitary gland, such as, for example, hyperpituitarism, hypopituitarism, pituitary dwarfism, pituitary adenoma, panhypopituitarism, acromegaly, gigantism; disorders and/or diseases of the thyroid, including but not limited to, hyperthyroidism, hypothyroidism, Plummer's disease, Graves' disease (toxic diffuse goiter), toxic nodular goiter, thyroiditis (Hashimoto's thyroiditis, subacute granulomatous thyroiditis, and silent lymphocytic thyroiditis), Pendred's syndrome, myxedema, cretinism, thyrotoxicosis, thyroid hormone coupling defect, thymic aplasia, Hurthle cell tumours of the thyroid, thyroid cancer, thyroid carcinoma, Medullary thyroid carcinoma; disorders and/or diseases of the parathyroid, such as, for example, hyperparathyroidism, hypoparathyroidism; disorders and/or diseases of the hypothalamus.

[0657] In addition, endocrine system and/or hormone imbalance disorders and/or diseases may also include disorders and/or diseases of the testes or ovaries, including cancer. Other disorders and/or diseases of the testes or ovaries further include, for example, ovarian cancer, polycystic ovary syndrome, Klinefelter's syndrome, vanishing testes syndrome (bilateral anorchia), congenital absence of Leydig's cells, cryptorchidism, Noonan's syndrome, myotonic dystrophy, capillary haemangioma of the testis (benign), neoplasias of the testis and neo-testis.

[0658] Moreover, endocrine system and/or hormone imbalance disorders and/or diseases may also include disorders and/or diseases such as, for example, polyglandular deficiency syndromes, pheochromocytoma, neuroblastoma, multiple Endocrine neoplasia, and disorders and/or cancers of endocrine tissues.

[0659] Gastrointestinal Disorders

[0660] Polynucleotides or polypeptides, or agonists or antagonists of the present invention, may be used to treat, prevent, diagnose, and/or prognose gastrointestinal disorders, including inflammatory diseases and/or conditions, infections, cancers (e.g., intestinal neoplasms (carcinoid tumor of the small intestine, non-Hodgkin's lymphoma of the small intestine, small bowl lymphoma)), and ulcers, such as peptic ulcers.

[0661] Gastrointestinal disorders include dysphagia, odynophagia, inflammation of the esophagus, peptic esophagitis, gastric reflux, submucosal fibrosis and stricturing, Mallory-Weiss lesions, leiomyomas, lipomas, epidermal cancers, adeoncarcinomas, gastric retention disorders, gastroenteritis, gastric atrophy, gastric/stomach cancers, polyps of the stomach, autoimmune disorders such as pernicious anemia, pyloric stenosis, gastritis (bacterial, viral, eosinophilic, stress-induced, chronic erosive, atrophic, plasma cell, and Menetrier's), and peritoneal diseases (e.g., chyloperioneum, hemoperitoneum, mesenteric cyst, mesenteric lymphadenitis, mesenteric vascular occlusion, panniculitis, neoplasms, peritonitis, pneumoperitoneum, bubphrenic abscess).

[0662] Gastrointestinal disorders also include disorders associated with the small intestine, such as malabsorption syndromes, distension, irritable bowel syndrome, sugar intolerance, celiac disease, duodenal ulcers, duodenitis, tropical sprue, Whipple's disease, intestinal lymphangiectasia, Crohn's disease, appendicitis, obstructions of the ileum, Meckel's diverticulum, multiple diverticula, failure of complete rotation of the small and large intestine, lymphoma, and bacterial and parasitic diseases (such as Traveler's diarrhea, typhoid and paratyphoid, cholera, infection by Roundworms (Ascariasis lumbricoides), Hookworms (Ancylostoma duodenale), Threadworms (Enterobius venvnicularis), Tapeworms (Taenia saginata, Echinococcus granulosus, Diphyllobothrium spp., and T. solium).

[0663] Liver diseases and/or disorders include intrahepatic cholestasis (alagille syndrome, biliary liver cirrhosis), fatty liver (alcoholic fatty liver, reye syndrome), hepatic vein thrombosis, hepatolentricular degeneration, hepatomegaly, hepatopulmonary syndrome, hepatorenal syndrome, portal hypertension (esophageal and gastric varices), liver abscess (amebic liver abscess), liver cirrhosis (alcoholic, biliary and experimental), alcoholic liver diseases (fatty liver, hepatitis, cirrhosis), parasitic (hepatic echinococcosis, fascioliasis, amebic liver abscess), jaundice (hemolytic, hepatocellular, and cholestatic), cholestasis, portal hypertension, liver enlargement, ascites, hepatitis (alcoholic hepatitis, animal hepatitis, chronic hepatitis (autoimmune, hepatitis B, hepatitis C, hepatitis D, drug induced), toxic hepatitis, viral human hepatitis (hepatitis A, hepatitis B, hepatitis C, hepatitis D, hepatitis E), Wilson's disease, granulomatous hepatitis, secondary biliary cirrhosis, hepatic encephalopathy, portal hypertension, varices, hepatic encephalopathy, primary biliary cirrhosis, primary sclerosing cholangitis, hepatocellular adenoma, hemangiomas, bile stones, liver failure (hepatic encephalopathy, acute liver failure), and liver neoplasms (angiomyolipoma, calcified liver metastases, cystic liver metastases, epithelial tumors, fibrolamellar hepatocarcinoma, focal nodular hyperplasia, hepatic adenoma, hepatobiliary cystadenoma, hepatoblastoma, hepatocellular carcinoma, hepatoma, liver cancer, liver hemangioendothelioma, mesenchymal hamartoma, mesenchymal tumors of liver, nodular regenerative hyperplasia, benign liver tumors (Hepatic cysts [Simple cysts, Polycystic liver disease, Hepatobiliary cystadenoma, Choledochal cyst], Mesenchymal tumors [Mesenchymal hamartoma, Infantile hemangioendothelioma, Hemangioma, Peliosis hepatis, Lipomas, Inflammatory pseudotumor, Miscellaneous], Epithelial tumors [Bile duct epithelium (Bile duct hamartoma, Bile duct adenoma), Hepatocyte (Adenoma, Focal nodular hyperplasia, Nodular regenerative hyperplasia)], malignant liver tumors [hepatocellular, hepatoblastoma, hepatocellular carcinoma, cholangiocellular, cholangiocarcinoma, cystadenocarcinoma, tumors of blood vessels, angiosarcoma, Karposi's sarcoma, hemangioendothelioma, other tumors, embryonal sarcoma, fibrosarcoma, leiomyosarcoma, rhabdomyosarcoma, carcinosarcoma, teratoma, carcinoid, squamous carcinoma, primary lymphoma]), peliosis hepatis, erythrohepatic porphyria, hepatic porphyria (acute intermittent porphyria, porphyria cutanea tarda), Zellweger syndrome).

[0664] Pancreatic diseases and/or disorders include acute pancreatitis, chronic pancreatitis (acute necrotizing pancreatitis, alcoholic pancreatitis), neoplasms (adenocarcinoma of the pancreas, cystadenocarcinoma, insulinoma, gastrinoma, and glucagonoma, cystic neoplasms, islet-cell tumors, pancreoblastoma), and other pancreatic diseases (e.g., cystic fibrosis, cyst (pancreatic pseudocyst, pancreatic fistula, insufficiency)).

[0665] Gallbladder diseases include gallstones (cholelithiasis and choledocholithiasis), postcholecystectomy syndrome, diverticulosis of the gallbladder, acute cholecystitis, chronic cholecystitis, bile duct tumors, and mucocele.

[0666] Diseases and/or disorders of the large intestine include antibiotic-associated colitis, diverticulitis, ulcerative colitis, acquired megacolon, abscesses, fungal and bacterial infections, anorectal disorders (e.g., fissures, hemorrhoids), colonic diseases (colitis, colonic neoplasms [colon cancer, adenomatous colon polyps (e.g., villous adenoma), colon carcinoma, colorectal cancer], colonic diverticulitis, colonic diverticulosis, megacolon [Hirschsprung disease, toxic megacolon]; sigmoid diseases [proctocolitis, sigmoin neoplasms]), constipation, Crohn's disease, diarrhea (infantile diarrhea, dysentery), duodenal diseases (duodenal neoplasms, duodenal obstruction, duodenal ulcer, duodenitis), enteritis (enterocolitis), HIV enteropathy, ileal diseases (ileal neoplasms, ileitis), immunoproliferative small intestinal disease, inflammatory bowel disease (ulcerative colitis, Crohn's disease), intestinal atresia, parasitic diseases (anisakiasis, balantidiasis, blastocystis infections, cryptosporidiosis, dientamoebiasis, amebic dysentery, giardiasis), intestinal fistula (rectal fistula), intestinal neoplasms (cecal neoplasms, colonic neoplasms, duodenal neoplasms, ileal neoplasms, intestinal polyps, jejunal neoplasms, rectal neoplasms), intestinal obstruction (afferent loop syndrome, duodenal obstruction, impacted feces, intestinal pseudo-obstruction [cecal volvulus], intussusception), intestinal perforation, intestinal polyps (colonic polyps, gardner syndrome, peutz-jeghers syndrome), jejunal diseases Oejunal neoplasms), malabsorption syndromes (blind loop syndrome, celiac disease, lactose intolerance, short bowl syndrome, tropical sprue, whipple's disease), mesenteric vascular occlusion, pneumatosis cystoides intestinalis, protein-losing enteropathies (intestinal lymphagiectasis), rectal diseases (anus diseases, fecal incontinence, hemorrhoids, proctitis, rectal fistula, rectal prolapse, rectocele), peptic ulcer (duodenal ulcer, peptic esophagitis, hemorrhage, perforation, stomach ulcer, Zollinger-Ellison syndrome), postgastrectomy syndromes (dumping syndrome), stomach diseases (e.g., achlorhydria, duodenogastric reflux (bile reflux), gastric antral vascular ectasia, gastric fistula, gastric outlet obstruction, gastritis (atrophic or hypertrophic), gastroparesis, stomach dilatation, stomach diverticulum, stomach neoplasms (gastric cancer, gastric polyps, gastric adenocarcinoma, hyperplastic gastric polyp), stomach rupture, stomach ulcer, stomach volvulus), tuberculosis, visceroptosis, vomiting (e.g., hematemesis, hyperemesis gravidarum, postoperative nausea and vomiting) and hemorrhagic colitis.

[0667] Further diseases and/or disorders of the gastrointestinal system include biliary tract diseases, such as, gastroschisis, fistula (e.g., biliary fistula, esophageal fistula, gastric fistula, intestinal fistula, pancreatic fistula), neoplasms (e.g., biliary tract neoplasms, esophageal neoplasms, such as adenocarcinoma of the esophagus, esophageal squamous cell carcinoma, gastrointestinal neoplasms, pancreatic neoplasms, such as adenocarcinoma of the pancreas, mucinous cystic neoplasm of the pancreas, pancreatic cystic neoplasms, pancreatoblastoma, and peritoneal neoplasms), esophageal disease (e.g., bullous diseases, candidiasis, glycogenic acanthosis, ulceration, barrett esophagus varices, atresia, cyst, diverticulum (e.g., Zenker's diverticulum), fistula (e.g., tracheoesophageal fistula), motility disorders (e.g., CREST syndrome, deglutition disorders, achalasia, spasm, gastroesophageal reflux), neoplasms, perforation (e.g., Boerhaave syndrome, Mallory-Weiss syndrome), stenosis, esophagitis, diaphragmatic hernia (e.g., hiatal hernia); gastrointestinal diseases, such as, gastroenteritis (e.g., cholera morbus, norwalk virus infection), hemorrhage (e.g., hematemesis, melena, peptic ulcer hemorrhage), stomach neoplasms (gastric cancer, gastric polyps, gastric adenocarcinoma, stomach cancer)), hernia (e.g., congenital diaphragmatic hernia, femoral hernia, inguinal hernia, obturator hernia, umbilical hernia, ventral hernia), and intestinal diseases (e.g., cecal diseases (appendicitis, cecal neoplasms)).

[0668] Developmental and Inherited Disorders

[0669] Polynuceotides or polypeptides, or agonists or antagonists of the present invention may be used to treat, prevent, diagnose, and/or prognose diseases associated with mixed fetal tissues, including, but not limited to, developmental and inherited disorders or defects of the nervous system, musculoskelelal system, execretory system, cardiovascular system, hematopoietic system, gastrointestinal system, reproductive system, and respiratory system. Compositions of the present invention may also be used to treat, prevent, diagnose, and/or prognose developmental and inherited disorders or defects associated with, but not limited to, skin, hair, visual, and auditory tissues, metabolism. Additionally, the compositions of the invention may be useful in the diagnosis, treatment, and/or prevention of disorders or diseases associated with, but not limited to, chromosomal or genetic abnormalities and hyperproliferation or neoplasia.

[0670] Disorders or defects of the nervous system associated with developmental or inherited abnormalities that may be diagnosed, treated, and/or prevented with the compostions of the invention include, but are not limited to, adrenoleukodystrophy, agenesis of corpus callosum, Alexander disease, anencephaly, Angelman syndrome, Arnold-Chiari deformity, Batten disease, Canavan disease, cephalic disorders, Charcot-Marie-Tooth disease, encephalocele, Friedreich's ataxia, Gaucher's disease, Gorlin syndrome, Hallervorden-Spatz disease, hereditary spastic paraplegia, Huntington disease, hydranencephaly, hydrocephalus, Joubert syndrome, Lesch-Nyhan syndrome, leukodystrophy, Menkes disease, microcephaly, Niemann-Pick Type C1, neurofibromatosis, porencephaly, progeria, proteus syndrome, Refsum disease, spina bifida, Sturge-Weber syndrome, Tay-Sachs disease, tuberous sclerosis, and von Hippel-Lindau disease.

[0671] Developmental and inherited disorders resulting in disorders or defects of the musculoskeletal system that may be diagnosed, treated, and/or prevented with the compositions of the invention include, but are not limited to, achondroplasia, atlanto-occipital fusion, arthrogryposis mulitplex congenita, autosomal recessive muscular dystrophy, Becker's muscular dystrophy, cerebral palsy, choanal atresia, cleft lip, cleft palate, clubfoot, congenital amputation, congenital dislocation of the hip, congenital torticollis, congenital scoliosis, dopa-repsonsive dystonia, Duchenne muscular dystrophy, early-onset generalized dystonia, femoral torsion, Gorlin syndrome, hypophosphatasia, Klippel-Feil syndrome, knee dislocation, myoclonic dystonia, myotonic dystrophy, nail-patella syndrome, osteogenesis imperfecta, paroxysmal dystonia, progeria, prune-belly syndrome, rapid-onset dystonia parkinsonism, scolosis, syndactyly, Treacher Collins' syndrome, velocardiofacial syndrome, and X-linked dystonia-parkinsonism.

[0672] Developmental or hereditary disorders or defects of the excretory system that may be diagnosed, treated, and/or prevented with the compositions of the invention include, but are not limited to, Alport's syndrome, Bartter's syndrome, bladder diverticula, bladder exstrophy, cystinuria, epispadias, Fanconi's syndrome, Hartnup disease, horseshoe kidney, hypospadias, kidney agenesis, kidney ectopia, kidney malrotation, Liddle's syndrome, medullary cystic disease, medullary sponge, multicystic kidney, kidney polycystic kidney disease, nail-patella syndrome, Potter's syndrome, urinary tract flow obstruction, vitamin D-resistant rickets, and Wilm's tumor.

[0673] Cardiovascular disorders or defects of developmental or hereditary origin that may be diagnosed, treated, and/or prevented with the compositions of the inventtion include, but are not limited to, aortic valve stenosis, atrial septal defects, artioventricular (A-V) canal defect, bicuspid aortic valve, coarctation or the aorta, dextrocardia, Ebstein's anomaly, Eisenmenger's complex, hypoplastic left heart syndrome, Marfan syndrome, patent ductus arteriosus, progeria, pulmonary atresia, pulmonary valve stenosis, subaortic stenosis, tetralogy of fallot, total anomalous pulmonary venous (P-V) connection, transposition of the great arteries, tricuspid atresia, truncus arteriosus, ventricular septal defects. Developmental or inherited disorders resulting in disorders involving the hematopoietic system that may be diagnosed, treated, and/or prevented with the compositions of the invention include, but not limited to, Bernard-Soulier syndrome, Chédiak-Higashi syndrome, hemophilia, Hermansky-Pudlak syndrome, sickle cell anemia, storage pool disease, thromboxane A2 dysfunction, thrombasthenia, and von Willebrand's disease.

[0674] The compositions of the invention may also be used to diagnose, treat, and/or prevent developmental and inherited disorders resulting in disorders or defects of the gastrointestinal system, including, but not limited to, anal atresia, biliary atresia, esophageal atresia, diaphragmatic hernia, Hirschsprung's disease, Meckel's diverticulum, oligohydramnios, omphalocele, polyhydramnios, porphyria, situs inversus viscera. Developmental or inherited disorders resulting in metabolic disorders that may be diagnosed, treated, and/or prevented with the compositions of the invention include, but are not limited to, alpha-1 antitrypsin deficiency, cystic fibrosis, hemochromatosis, lysosomal storage disease, phenylketonuria, Wilson's disease, and Zellweger syndrome.

[0675] Disorders of the reproductive system that are developmentally or hereditary related that may also be diagnosed, treated, and/or prevented with the compositions of the invention include, but are not limited to, androgen insensitivity syndrome, ambiguous genitalia, autosomal sex reversal, congenital adreneal hyperplasia, gonadoblastoma, ovarian germ cell cancer, pseudohermphroditism, true hermaphroditism, undescended testis, XX male syndrome, and XY female type gonadal dysgenesis. The compositions of the invention may also be used to diagnose, treat, and/or prevent developmental or inherited respiratory defects including, but not limited to, askin tumor, azygos lobe, congenital diaphragmatic hernia, congenital lobar emphysema, cystic adenomatoid malformation, lobar emphysema, hyaline membrane disease, and pectus excavatum.

[0676] Developmental or inherited disorders may also result from chromosomal or genetic aberration that may be diagnosed, treated, and/or prevented with the compositions of the invention including, but not limited to, 4p-syndrome, cri du chat syndrome, Digeorge syndrome, Down's syndrome, Edward's syndrome, fragile X syndrome, Klinefelter's syndrome, Patau's syndrome, Prader-Willi syndrome, progeria, Turner's syndrome, triple X syndrome, and XYY syndrome. Other developmental disorders that can be diagnosed, treated, and/or prevented with the compositions of the invention, include, but are not limited to, fetal alcohol syndrome, and can be caused by environmental factors surrounding the developing fetus.

[0677] The compositions of the invention may further be able to be used to diagnose, treat, and/or prevent errors in development or a genetic disposition that may result in hyperproliferative disorders or neoplasms, including, but not limited to, acute childhood lymphoblastic leukemia, askin tumor, Beckwith-Wiedemann syndrome, childhood acute myeloid leukemia, childhood brain stem glioma, childhood cerebellar astrocytoma, childhood extracranial germ cell tumors childhood (primary), gonadoblastoma, hepatocellular cancer, childhood Hodgkin's disease, childhood Hodgkin's lymphoma, childhood hypothalamic and visual pathway glioma, childhood (primary) liver cancer, childhood lymphoblastic leukemia, childhood medulloblastoma, childhood non-Hodgkin's lymphoma, childhood pineal and supratentorial primitive neuroectodermal tumors, childhood primary liver cancer, childhood rhabdomyosarcoma, childhood soft tissue sarcoma, Gorlin syndrome, familial multiple endrocrine neoplasia type I, neuroblastoma, ovarian germ cell cancer, pheochromocytoma, retinoblastoma, and Wilm's tumor.

[0678] Polypeptides may be administered using any method known in the art, including, but not limited to, direct needle injection at the delivery site, intravenous injection, topical administration, catheter infusion, biolistic injectors, particle accelerators, gelfoam sponge depots, other commercially available depot materials, osmotic pumps, oral or suppositorial solid pharmaceutical formulations, decanting or topical applications during surgery, aerosol delivery. Such methods are known in the art. Polypeptides may be administered as part of a Therapeutic, described in more detail below. Methods of delivering polynucleotides are described in more detail herein.

[0679] Diseases at the Cellular Level

[0680] Diseases associated with increased cell survival or the inhibition of apoptosis that could be treated or detected by polynucleotides or polypeptides, as well as antagonists or agonists of the present invention, include cancers (such as follicular lymphomas, carcinomas with p53 mutations, and hormone-dependent tumors, including, but not limited to colon cancer, cardiac tumors, pancreatic cancer, melanoma, retinoblastoma, glioblastoma, lung cancer, intestinal cancer, testicular cancer, stomach cancer, neuroblastoma, myxoma, myoma, lymphoma, endothelioma, osteoblastoma, osteoclastoma, osteosarcoma, chondrosarcoma, adenoma, breast cancer, prostate cancer, Kaposi's sarcoma and ovarian cancer); autoimmune disorders (such as, multiple sclerosis, Sjogren's syndrome, Hashimoto's thyroiditis, biliary cirrhosis, Behcet's disease, Crohn's disease, polymyositis, systemic lupus erythematosus and immune-related glomerulonephritis and rheumatoid arthritis) and viral infections (such as herpes viruses, pox viruses and adenoviruses), inflammation, graft v. host disease, acute graft rejection, and chronic graft rejection. In preferred embodiments, polynucleotides, polypeptides, and/or antagonists of the invention are used to inhibit growth, progression, and/or metasis of cancers, in particular those listed above.

[0681] Additional diseases or conditions associated with increased cell survival that could be treated or detected by polynucleotides or polypeptides, or agonists or antagonists of the present invention include, but are not limited to, progression, and/or metastases of malignancies and related disorders such as leukemia (including acute leukemias (e.g., acute lymphocytic leukemia, acute myelocytic leukemia (including myeloblastic, promyelocytic, myelomonocytic, monocytic, and erythroleukemia)) and chronic leukemias (e.g., chronic myelocytic (granulocytic) leukemia and chronic lymphocytic leukemia)), polycythemia vera, lymphomas (e.g., Hodgkin's disease and non-Hodgkin's disease), multiple myeloma, Waldenstrom's macroglobulinemia, heavy chain disease, and solid tumors including, but not limited to, sarcomas and carcinomas such as fibrosarcoma, myxosarcoma, liposarcoma, chondrosarcoma, osteogenic sarcoma, chordoma, angiosarcoma, endotheliosarcoma, lymphangiosarcoma, lymphangioendotheliosarcoma, synovioma, mesothelioma, Ewing's tumor, leiomyosarcoma, rhabdomyosarcoma, colon carcinoma, pancreatic cancer, breast cancer, ovarian cancer, prostate cancer, squamous cell carcinoma, basal cell carcinoma, adenocarcinoma, sweat gland carcinoma, sebaceous gland carcinoma, papillary carcinoma, papillary adenocarcinomas, cystadenocarcinoma, medullary carcinoma, bronchogenic carcinoma, renal cell carcinoma, hepatoma, bile duct carcinoma, choriocarcinoma, seminoma, embryonal carcinoma, Wilm's tumor, cervical cancer, testicular tumor, lung carcinoma, small cell lung carcinoma, bladder carcinoma, epithelial carcinoma, glioma, astrocytoma, medulloblastoma, craniopharyngioma, ependymoma, pinealoma, hemangioblastoma, acoustic neuroma, oligodendroglioma, menangioma, melanoma, neuroblastoma, and retinoblastoma.

[0682] Diseases associated with increased apoptosis that could be treated or detected by polynucleotides or polypeptides, as well as agonists or antagonists of the present invention, include AIDS; neurodegenerative disorders (such as Alzheimer's disease, Parkinson's disease, Amyotrophic lateral sclerosis, Retinitis pigmentosa, Cerebellar degeneration and brain tumor or prior associated disease); autoimmune disorders (such as, multiple sclerosis, Sjogren's syndrome, Hashimoto's thyroiditis, biliary cirrhosis, Behcet's disease, Crohn's disease, polymyositis, systemic lupus erythematosus and immune-related glomerulonephritis and rheumatoid arthritis) myelodysplastic syndromes (such as aplastic anemia), graft v. host disease, ischemic injury (such as that caused by myocardial infarction, stroke and reperfusion injury), liver injury (e.g., hepatitis related liver injury, ischemia/reperfusion injury, cholestosis (bile duct injury) and liver cancer); toxin-induced liver disease (such as that caused by alcohol), septic shock, cachexia and anorexia.

[0683] Wound Healing and Epithelial Cell Proliferation

[0684] In accordance with yet a further aspect of the present invention, there is provided a process for utilizing polynucleotides or polypeptides, as well as agonists or antagonists of the present invention, for therapeutic purposes, for example, to stimulate epithelial cell proliferation and basal keratinocytes for the purpose of wound healing, and to stimulate hair follicle production and healing of dermal wounds. Polynucleotides or polypeptides, as well as agonists or antagonists of the present invention, may be clinically useful in stimulating wound healing including surgical wounds, excisional wounds, deep wounds involving damage of the dermis and epidermis, eye tissue wounds, dental tissue wounds, oral cavity wounds, diabetic ulcers, dermal ulcers, cubitus ulcers, arterial ulcers, venous stasis ulcers, burns resulting from heat exposure or chemicals, and other abnormal wound healing conditions such as uremia, malnutrition, vitamin deficiencies and complications associted with systemic treatment with steroids, radiation therapy and antineoplastic drugs and antimetabolites. Polynucleotides or polypeptides, as well as agonists or antagonists of the present invention, could be used to promote dermal reestablishment subsequent to dermal loss.

[0685] Polynucleotides or polypeptides, as well as agonists or antagonists of the present invention, could be used to increase the adherence of skin grafts to a wound bed and to stimulate re-epithelialization from the wound bed. The following are types of grafts that polynucleotides or polypeptides, agonists or antagonists of the present invention, could be used to increase adherence to a wound bed: autografts, artificial skin, allografts, autodermic graft, autoepdermic grafts, avacular grafts, Blair-Brown grafts, bone graft, brephoplastic grafts, cutis graft, delayed graft, dermic graft, epidermic graft, fascia graft, full thickness graft, heterologous graft, xenograft, homologous graft, hyperplastic graft, lamellar graft, mesh graft, mucosal graft, Ollier-Thiersch graft, omenpal graft, patch graft, pedicle graft, penetrating graft, split skin graft, thick split graft. Polynucleotides or polypeptides, as well as agonists or antagonists of the present invention, can be used to promote skin strength and to improve the appearance of aged skin.

[0686] It is believed that polynucleotides or polypeptides, as well as agonists or antagonists of the present invention, will also produce changes in hepatocyte proliferation, and epithelial cell proliferation in the lung, breast, pancreas, stomach, small intesting, and large intestine. Polynucleotides or polypeptides, as well as agonists or antagonists of the present invention, could promote proliferation of epithelial cells such as sebocytes, hair follicles, hepatocytes, type II pneumocytes, mucin-producing goblet cells, and other epithelial cells and their progenitors contained within the skin, lung, liver, and gastrointestinal tract. Polynucleotides or polypeptides, agonists or antagonists of the present invention, may promote proliferation of endothelial cells, keratinocytes, and basal keratinocytes.

[0687] Polynucleotides or polypeptides, as well as agonists or antagonists of the present invention, could also be used to reduce the side effects of gut toxicity that result from radiation, chemotherapy treatments or viral infections. Polynucleotides or polypeptides, as well as agonists or antagonists of the present invention, may have a cytoprotective effect on the small intestine mucosa. Polynucleotides or polypeptides, as well as agonists or antagonists of the present invention, may also stimulate healing of mucositis (mouth ulcers) that result from chemotherapy and viral infections.

[0688] Polynucleotides or polypeptides, as well as agonists or antagonists of the present invention, could further be used in full regeneration of skin in full and partial thickness skin defects, including burns, (i.e., repopulation of hair follicles, sweat glands, and sebaceous glands), treatment of other skin defects such as psoriasis. Polynucleotides or polypeptides, as well as agonists or antagonists of the present invention, could be used to treat epidermolysis bullosa, a defect in adherence of the epidermis to the underlying dermis which results in frequent, open and painful blisters by accelerating reepithelialization of these lesions. Polynucleotides or polypeptides, as well as agonists or antagonists of the present invention, could also be used to treat gastric and doudenal ulcers and help heal by scar formation of the mucosal lining and regeneration of glandular mucosa and duodenal mucosal lining more rapidly. Inflamamatory bowel diseases, such as Crohn's disease and ulcerative colitis, are diseases which result in destruction of the mucosal surface of the small or large intestine, respectively. Thus, polynucleotides or polypeptides, as well as agonists or antagonists of the present invention, could be used to promote the resurfacing of the mucosal surface to aid more rapid healing and to prevent progression of inflammatory bowel disease. Treatment with polynucleotides or polypeptides, agonists or antagonists of the present invention, is expected to have a significant effect on the production of mucus throughout the gastrointestinal tract and could be used to protect the intestinal mucosa from injurious substances that are ingested or following surgery. Polynucleotides or polypeptides, as well as agonists or antagonists of the present invention, could be used to treat diseases associate with the under expression.

[0689] Moreover, polynucleotides or polypeptides, as well as agonists or antagonists of the present invention, could be used to prevent and heal damage to the lungs due to various pathological states. Polynucleotides or polypeptides, as well as agonists or antagonists of the present invention, which could stimulate proliferation and differentiation and promote the repair of alveoli and brochiolar epithelium to prevent or treat acute or chronic lung damage. For example, emphysema, which results in the progressive loss of aveoli, and inhalation injuries, i.e., resulting from smoke inhalation and burns, that cause necrosis of the bronchiolar epithelium and alveoli could be effectively treated using polynucleotides or polypeptides, agonists or antagonists of the present invention. Also, polynucleotides or polypeptides, as well as agonists or antagonists of the present invention, could be used to stimulate the proliferation of and differentiation of type II pneumocytes, which may help treat or prevent disease such as hyaline membrane diseases, such as infant respiratory distress syndrome and bronchopulmonary displasia, in premature infants.

[0690] Polynucleotides or polypeptides, as well as agonists or antagonists of the present invention, could stimulate the proliferation and differentiation of hepatocytes and, thus, could be used to alleviate or treat liver diseases and pathologies such as fulminant liver failure caused by cirrhosis, liver damage caused by viral hepatitis and toxic substances (i.e., acetaminophen, carbon tetraholoride and other hepatotoxins known in the art).

[0691] In addition, polynucleotides or polypeptides, as well as agonists or antagonists of the present invention, could be used treat or prevent the onset of diabetes mellitus. In patients with newly diagnosed Types I and II diabetes, where some islet cell function remains, polynucleotides or polypeptides, as well as agonists or antagonists of the present invention, could be used to maintain the islet function so as to alleviate, delay or prevent permanent manifestation of the disease. Also, polynucleotides or polypeptides, as well as agonists or antagonists of the present invention, could be used as an auxiliary in islet cell transplantation to improve or promote islet cell function.

[0692] Infectious Disease

[0693] Polynucleotides or polypeptides, as well as agonists or antagonists of the present invention can be used to treat or detect infectious agents. For example, by increasing the immune response, particularly increasing the proliferation and differentiation of B and/or T cells, infectious diseases may be treated. The immune response may be increased by either enhancing an existing immune response, or by initiating a new immune response. Alternatively, polynucleotides or polypeptides, as well as agonists or antagonists of the present invention may also directly inhibit the infectious agent, without necessarily eliciting an immune response.

[0694] Viruses are one example of an infectious agent that can cause disease or symptoms that can be treated or detected by a polynucleotide or polypeptide and/or agonist or antagonist of the present invention. Examples of viruses, include, but are not limited to Examples of viruses, include, but are not limited to the following DNA and RNA viruses and viral families: Arbovirus, Adenoviridae, Arenaviridae, Arterivirus, Birnaviridae, Bunyaviridae, Caliciviridae, Circoviridae, Coronaviridae, Dengue, EBV, HIV, Flavivifidae, Hepadnaviridae (Hepatitis), Herpesviridae (such as, Cytomegalovirus, Herpes Simplex, Herpes Zoster), Mononegavirus (e.g., Paramyxoviridae, Morbillivirus, Rhabdoviridae), Orthomyxoviridae (e.g., Influenza A, Influenza B, and parainfluenza), Papiloma virus, Papovaviridae, Parvovifidae, Picornaviridae, Poxviridae (such as Smallpox or Vaccinia), Reoviridae (e.g., Rotavirus), Retroviridae (HTLV-I, HTLV-II, Lentivirus), and Togaviridae (e.g., Rubivirus). Viruses falling within these families can cause a variety of diseases or symptoms, including, but not limited to: arthritis, bronchiollitis, respiratory syncytial virus, encephalitis, eye infections (e.g., conjunctivitis, keratitis), chronic fatigue syndrome, hepatitis (A, B, C, E, Chronic Active, Delta), Japanese B encephalitis, Junin, Chikungunya, Rift Valley fever, yellow fever, meningitis, opportunistic infections (e.g., AIDS), pneumonia, Burkitt's Lymphoma, chickenpox, hemorrhagic fever, Measles, Mumps, Parainfluenza, Rabies, the common cold, Polio, leukemia, Rubella, sexually transmitted diseases, skin diseases (e.g., Kaposi's, warts), and viremia. polynucleotides or polypeptides, or agonists or antagonists of the invention, can be used to treat or detect any of these symptoms or diseases. In specific embodiments, polynucleotides, polypeptides, or agonists or antagonists of the invention are used to treat: meningitis, Dengue, EBV, and/or hepatitis (e.g., hepatitis B). In an additional specific embodiment polynucleotides, polypeptides, or agonists or antagonists of the invention are used to treat patients nonresponsive to one or more other commercially available hepatitis vaccines. In a further specific embodiment polynucleotides, polypeptides, or agonists or antagonists of the invention are used to treat AIDS.

[0695] Similarly, bacterial or fungal agents that can cause disease or symptoms and that can be treated or detected by a polynucleotide or polypeptide and/or agonist or antagonist of the present invention include, but are not limited to, the following Gram-Negative and Gram-positive bacteria, bacterial families, and fungi: Actinomyces (e.g., Norcardia), Acinetobacter, Cryptococcus neoformans, Aspergillus, Bacillaceae (e.g., Bacillus anthrasis), Bacteroides (e.g., Bacteroides fragilis), Blastomycosis, Bordetella, Borrelia (e.g., Borrelia burgdorferi), Brucella, Candidia, Campylobacter, Chlamydia, Clostridium (e.g., Clostridium botulinum, Clostridium dificile, Clostridium perfringens, Clostridium tetani), Coccidioides, Corynebacterium (e.g., Corynebacterium diptheriae), Cryptococcus, Dermatocycoses, E. coli (e.g., Enterotoxigenic E. coli and Enterohemorrhagic E. coli ), Enterobacter (e.g. Enterobacter aerogenes), Enterobacteriaceae (Klebsiella, Salmonella (e.g., Salmonella typhi, Salmonella enteritidis, Salmonella paratyphi), Serratia, Yersinia, Shigella), Erysipelothrix, Haemophilus (e.g., Haemophilus influenza type B), Helicobacter, Legionella (e.g., Legionella pneumophila), Leptospira, Listeria (e.g., Listeria monocytogenes), Mycoplasma, Mycobacterium (e.g., Mycobacterium leprae and Mycobacterium tuberculosis), Vibrio (e.g., Vibrio cholerae), Neisseriaceae (e.g., Neisseria gonorrhea, Neisseria meningitidis), Pasteurellacea, Proteus, Pseudomonas (e.g., Psuedomonas aeruginosa), Rickettsiaceae, Spirochetes (e.g., Treponema spp., Leptospira spp., Borrelia spp.) Shigella spp., Staphylococcus (e.g., Staphylococcus aureus), Meningiococcus, Pneumococcus and Streptococcus (e.g., Streptococcus pneumoniae and Groups A, B, and C Streptococci), and Ureaplasmas. These bacterial, parasitic, and fungal families can cause diseases or symptoms, including, but not limited to: antibiotic-resistant infections, bacteremia, endocarditis, septicemia, eye infections (conjunctivitis) tuberculosis, uveitis, gingivitis, bacterial diarrhea, opportunistic infections (e.g., AIDS related infections), paronychia, prosthesis-related infections, dental caries, Reiter's Disease, respiratory tract infections (e.g., Whooping Cough or Empyema), sepsis, Lyme Disease, Cat-Scratch Disease, dysentery, paratyphoid fever, food poisoning, Legionella disease, chronic and acute inflammation, erythema, yeast infections, typhoid, pneumonia, gonorrhea, meningitis (e.g., meningitis types A and B), chlamydia, syphilis, diphtheria, leprosy, burcellosis, peptic ulcers, anthrax, spontaneous abortion, birth defects, lung infections, ear infections, deafness, blindness, lethargy, malaise, vomiting, chronic diarrhea, Crohn's disease, colitis, vaginosis, sterility, pelvic inflammatory disease, candidiasis, paratuberculosis, tuberculosis, lupus, botulism, gangrene, tetanus, impetigo, Rheumatic Fever, Scarlet Fever, sexually transmitted diseases, skin diseases (e.g., cellulitis, dermatocycoses), toxemia, urinary tract infections, wound infections or noscomial infections. Polynucleotides or polypeptides, agonists or antagonists of the invention, can be used to treat or detect any of these symptoms or diseases. In specific embodiments, polynucleotides, polypeptides, agonists or antagonists of the invention are used to treat: tetanus, diptheria, botulism, and/or meningitis type B.

[0696] Moreover, parasitic agents causing disease or symptoms that can be treated or detected by a polynucleotide or polypeptide and/or agonist or antagonist of the present invention include, but not limited to, the following families or class: Amebiasis, Babesiosis, Coccidiosis, Cryptosporidiosis, Dientamoebiasis, Dourine, Ectoparasitic, Giardiasis, Helminthiasis, Leishmaniasis, Theileriasis, Toxoplasmosis, Trypanosomiasis, and Trichomonas and Sporozoans (e.g., Plasmodium virax, Plasmodium falciparium, Plasmodium malariae and Plasmodium ovale). These parasites can cause a variety of diseases or symptoms, including, but not limited to: Scabies, Trombiculiasis, eye infections, intestinal disease (e.g., dysentery, giardiasis), liver disease, lung disease, opportunistic infections (e.g., AIDS related), malaria, pregnancy complications, and toxoplasmosis. polynucleotides or polypeptides, or agonists or antagonists of the invention, can be used to treat or detect any of these symptoms or diseases.

[0697] Polynucleotides or polypeptides, as well as agonists or antagonists of the present invention of the present invention could either be by administering an effective amount of a polypeptide to the patient, or by removing cells from the patient, supplying the cells with a polynucleotide of the present invention, and returning the engineered cells to the patient (ex vivo therapy). Moreover, the polypeptide or polynucleotide of the present invention can be used as an antigen in a vaccine to raise an immune response against infectious disease.

[0698] Regeneration

[0699] Polynucleotides or polypeptides, as well as agonists or antagonists of the present invention can be used to differentiate, proliferate, and attract cells, leading to the regeneration of tissues. (See, Science 276:59-87 (1997).) The regeneration of tissues could be used to repair, replace, or protect tissue damaged by congenital defects, trauma (wounds, burns, incisions, or ulcers), age, disease (e.g. osteoporosis, osteocarthritis, periodontal disease, liver failure), surgery, including cosmetic plastic surgery, fibrosis, reperfusion injury, or systemic cytokine damage.

[0700] Tissues that could be regenerated using the present invention include organs (e.g., pancreas, liver, intestine, kidney, skin, endothelium), muscle (smooth, skeletal or cardiac), vasculature (including vascular and lymphatics), nervous, hematopoietic, and skeletal (bone, cartilage, tendon, and ligament) tissue. Preferably, regeneration occurs without or decreased scarring. Regeneration also may include angiogenesis.

[0701] Moreover, polynucleotides or polypeptides, as well as agonists or antagonists of the present invention, may increase regeneration of tissues difficult to heal. For example, increased tendon/ligament regeneration would quicken recovery time after damage. Polynucleotides or polypeptides, as well as agonists or antagonists of the present invention could also be used prophylactically in an effort to avoid damage. Specific diseases that could be treated include of tendinitis, carpal tunnel syndrome, and other tendon or ligament defects. A further example of tissue regeneration of non-healing wounds includes pressure ulcers, ulcers associated with vascular insufficiency, surgical, and traumatic wounds.

[0702] Similarly, nerve and brain tissue could also be regenerated by using polynucleotides or polypeptides, as well as agonists or antagonists of the present invention, to proliferate and differentiate nerve cells. Diseases that could be treated using this method include central and peripheral nervous system diseases, neuropathies, or mechanical and traumatic disorders (e.g., spinal cord disorders, head trauma, cerebrovascular disease, and stoke). Specifically, diseases associated with peripheral nerve injuries, peripheral neuropathy (e.g., resulting from chemotherapy or other medical therapies), localized neuropathies, and central nervous system diseases (e.g., Alzheimer's disease, Parkinson's disease, Huntington's disease, amyotrophic lateral sclerosis, and Shy-Drager syndrome), could all be treated using the polynucleotides or polypeptides, as well as agonists or antagonists of the present invention.

[0703] Chemotaxis

[0704] Polynucleotides or polypeptides, as well as agonists or antagonists of the present invention may have chemotaxis activity. A chemotaxic molecule attracts or mobilizes cells (e.g., monocytes, fibroblasts, neutrophils, T-cells, mast cells, eosinophils, epithelial and/or endothelial cells) to a particular site in the body, such as inflammation, infection, or site of hyperproliferation. The mobilized cells can then fight off and/or heal the particular trauma or abnormality.

[0705] Polynucleotides or polypeptides, as well as agonists or antagonists of the present invention may increase chemotaxic activity of particular cells. These chemotactic molecules can then be used to treat inflammation, infection, hyperproliferative disorders, or any immune system disorder by increasing the number of cells targeted to a particular location in the body. For example, chemotaxic molecules can be used to treat wounds and other trauma to tissues by attracting immune cells to the injured location. Chemotactic molecules of the present invention can also attract fibroblasts, which can be used to treat wounds.

[0706] It is also contemplated that polynucleotides or polypeptides, as well as agonists or antagonists of the present invention may inhibit chemotactic activity. These molecules could also be used to treat disorders. Thus, polynucleotides or polypeptides, as well as agonists or antagonists of the present invention could be used as an inhibitor of chemotaxis.

[0707] Binding Activity

[0708] A polypeptide of the present invention may be used to screen for molecules that bind to the polypeptide or for molecules to which the polypeptide binds. The binding of the polypeptide and the molecule may activate (agonist), increase, inhibit (antagonist), or decrease activity of the polypeptide or the molecule bound. Examples of such molecules include antibodies, oligonucleotides, proteins (e.g., receptors), or small molecules.

[0709] Preferably, the molecule is closely related to the natural ligand of the polypeptide, e.g., a fragment of the ligand, or a natural substrate, a ligand, a structural or functional mimetic. (See, Coligan et al., Current Protocols in Immunology 1(2):Chapter 5 (1991).) Similarly, the molecule can be closely related to the natural receptor to which the polypeptide binds, or at least, a fragment of the receptor capable of being bound by the polypeptide (e.g., active site). In either case, the molecule can be rationally designed using known techniques.

[0710] Preferably, the screening for these molecules involves producing appropriate cells which express the polypeptide. Preferred cells include cells from mammals, yeast, Drosophila, or E. coli. Cells expressing the polypeptide (or cell membrane containing the expressed polypeptide) are then preferably contacted with a test compound potentially containing the molecule to observe binding, stimulation, or inhibition of activity of either the polypeptide or the molecule.

[0711] The assay may simply test binding of a candidate compound to the polypeptide, wherein binding is detected by a label, or in an assay involving competition with a labeled competitor. Further, the assay may test whether the candidate compound results in a signal generated by binding to the polypeptide.

[0712] Alternatively, the assay can be carried out using cell-free preparations, polypeptide/molecule affixed to a solid support, chemical libraries, or natural product mixtures. The assay may also simply comprise the steps of mixing a candidate compound with a solution containing a polypeptide, measuring polypeptide/molecule activity or binding, and comparing the polypeptide/molecule activity or binding to a standard.

[0713] Preferably, an ELISA assay can measure polypeptide level or activity in a sample (e.g., biological sample) using a monoclonal or polyclonal antibody. The antibody can measure polypeptide level or activity by either binding, directly or indirectly, to the polypeptide or by competing with the polypeptide for a substrate.

[0714] Additionally, the receptor to which the polypeptide of the present invention binds can be identified by numerous methods known to those of skill in the art, for example, ligand panning and FACS sorting (Coligan, et al., Current Protocols in Immun., 1(2), Chapter 5, (1991)). For example, expression cloning is employed wherein polyadenylated RNA is prepared from a cell responsive to the polypeptides, for example, NIH3T3 cells which are known to contain multiple receptors for the FGF family proteins, and SC-3 cells, and a cDNA library created from this RNA is divided into pools and used to transfect COS cells or other cells that are not responsive to the polypeptides. Transfected cells which are grown on glass slides are exposed to the polypeptide of the present invention, after they have been labelled. The polypeptides can be labeled by a variety of means including jodination or inclusion of a recognition site for a site-specific protein kinase.

[0715] Following fixation and incubation, the slides are subjected to auto-radiographic analysis. Positive pools are identified and sub-pools are prepared and re-transfected using an iterative sub-pooling and re-screening process, eventually yielding a single clones that encodes the putative receptor.

[0716] As an alternative approach for receptor identification, the labeled polypeptides can be photoaffinity linked with cell membrane or extract preparations that express the receptor molecule. Cross-linked material is resolved by PAGE analysis and exposed to X-ray film. The labeled complex containing the receptors of the polypeptides can be excised, resolved into peptide fragments, and subjected to protein microsequencing. The amino acid sequence obtained from microsequencing would be used to design a set of degenerate oligonucleotide probes to screen a cDNA library to identify the genes encoding the putative receptors.

[0717] Moreover, the techniques of gene-shuffling, motif-shuffling, exon-shuffling, and/or codon-shuffling (collectively referred to as “DNA shuffling”) may be employed to modulate the activities of the polypeptide of the present invention thereby effectively generating agonists and antagonists of the polypeptide of the present invention. See generally, U.S. Pat. Nos. 5,605,793, 5,811,238, 5,830,721, 5,834,252, and 5,837,458, and Patten, P. A., et al., Curr. Opinion Biotechnol. 8:724-33 (1997); Harayama, S. Trends Biotechnol. 16(2):76-82 (1998); Hansson, L. O., et al., J. Mol. Biol. 287:265-76 (1999); and Lorenzo, M. M. and Blasco, R. Biotechniques 24(2):308-13 (1998) (each of these patents and publications are hereby incorporated by reference). In one embodiment, alteration of polynucleotides and corresponding polypeptides may be achieved by DNA shuffling. DNA shuffling involves the assembly of two or more DNA segments into a desired molecule by homologous, or site-specific, recombination. In another embodiment, polynucleotides and corresponding polypeptides may be altered by being subjected to random mutagenesis by error-prone PCR, random nucleotide insertion or other methods prior to recombination. In another embodiment, one or more components, motifs, sections, parts, domains, fragments, etc., of the polypeptide of the present invention may be recombined with one or more components, motifs, sections, parts, domains, fragments, etc. of one or more heterologous molecules. In preferred embodiments, the heterologous molecules are family members. In further preferred embodiments, the heterologous molecule is a growth factor such as, for example, platelet-derived growth factor (PDGF), insulin-like growth factor (IGF-I), transforming growth factor (TGF)-alpha, epidermal growth factor (EGF), fibroblast growth factor (FGF), TGF-beta, bone morphogenetic protein (BMP)-2, BMP-4, BMP-5, BMP-6, BMP-7, activins A and B, decapentaplegic(dpp), 60A, OP-2, dorsalin, growth differentiation factors (GDFs), nodal, MIS, inhibin-alpha, TGF-beta1, TGF-beta2, TGF-beta3, TGF-beta5, and glial-derived neurotrophic factor (GDNF).

[0718] Other preferred fragments are biologically active fragments of the polypeptide of the present invention. Biologically active fragments are those exhibiting activity similar, but not necessarily identical, to an activity of the polypeptide of the present invention. The biological activity of the fragments may include an improved desired activity, or a decreased undesirable activity.

[0719] Additionally, this invention provides a method of screening compounds to identify those which modulate the action of the polypeptide of the present invention. An example of such an assay comprises combining a mammalian fibroblast cell, a the polypeptide of the present invention, the compound to be screened and ³[H] thymidine under cell culture conditions where the fibroblast cell would normally proliferate. A control assay may be performed in the absence of the compound to be screened and compared to the amount of fibroblast proliferation in the presence of the compound to determine if the compound stimulates proliferation by determining the uptake of ³[H] thymidine in each case. The amount of fibroblast cell proliferation is measured by liquid scintillation chromatography which measures the incorporation of ³[H] thymidine. Both agonist and antagonist compounds may be identified by this procedure.

[0720] In another method, a mammalian cell or membrane preparation expressing a receptor for a polypeptide of the present invention is incubated with a labeled polypeptide of the present invention in the presence of the compound. The ability of the compound to enhance or block this interaction could then be measured. Alternatively, the response of a known second messenger system following interaction of a compound to be screened and the receptor is measured and the ability of the compound to bind to the receptor and elicit a second messenger response is measured to determine if the compound is a potential agonist or antagonist. Such second messenger systems include but are not limited to, cAMP guanylate cyclase, ion channels or phosphoinositide hydrolysis.

[0721] All of these above assays can be used as diagnostic or prognostic markers. The molecules discovered using these assays can be used to treat disease or to bring about a particular result in a patient (e.g., blood vessel growth) by activating or inhibiting the polypeptide/molecule. Moreover, the assays can discover agents which may inhibit or enhance the production of the polypeptides of the invention from suitably manipulated cells or tissues.

[0722] Therefore, the invention includes a method of identifying compounds which bind to a polypeptide of the invention comprising the steps of: (a) incubating a candidate binding compound with a polypeptide of the present invention; and (b) determining if binding has occurred. Moreover, the invention includes a method of identifying agonists/antagonists comprising the steps of: (a) incubating a candidate compound with a polypeptide of the present invention, (b) assaying a biological activity, and (b) determining if a biological activity of the polypeptide has been altered.

[0723] Targeted Delivery

[0724] In another embodiment, the invention provides a method of delivering compositions to targeted cells expressing a receptor for a polypeptide of the invention, or cells expressing a cell bound form of a polypeptide of the invention.

[0725] As discussed herein, polypeptides or antibodies of the invention may be associated with heterologous polypeptides, heterologous nucleic acids, toxins, or prodrugs via hydrophobic, hydrophilic, ionic and/or covalent interactions. In one embodiment, the invention provides a method for the specific delivery of compositions of the invention to cells by administering polypeptides of the invention (including antibodies) that are associated with heterologous polypeptides or nucleic acids. In one example, the invention provides a method for delivering a therapeutic protein into the targeted cell. In another example, the invention provides a method for delivering a single stranded nucleic acid (e.g., antisense or ribozymes) or double stranded nucleic acid (e.g., DNA that can integrate into the cell's genome or replicate episomally and that can be transcribed) into the targeted cell.

[0726] In another embodiment, the invention provides a method for the specific destruction of cells (e.g., the destruction of tumor cells) by administering polypeptides of the invention (e.g., polypeptides of the invention or antibodies of the invention) in association with toxins or cytotoxic prodrugs.

[0727] By “toxin” is meant compounds that bind and activate endogenous cytotoxic effector systems, radioisotopes, holotoxins, modified toxins, catalytic subunits of toxins, or any molecules or enzymes not normally present in or on the surface of a cell that under defined conditions cause the cell's death. Toxins that may be used according to the methods of the invention include, but are not limited to, radioisotopes known in the art, compounds such as, for example, antibodies (or complement fixing containing portions thereof) that bind an inherent or induced endogenous cytotoxic effector system, thymidine kinase, endonuclease, RNAse, alpha toxin, ricin, abrin, Pseudomonas exotoxin A, diphtheria toxin, saporin, momordin, gelonin, pokeweed antiviral protein, alpha-sarcin and cholera toxin. By “cytotoxic prodrug” is meant a non-toxic compound that is converted by an enzyme, normally present in the cell, into a cytotoxic compound. Cytotoxic prodrugs that may be used according to the methods of the invention include, but are not limited to, glutamyl derivatives of benzoic acid mustard alkylating agent, phosphate derivatives of etoposide or mitomycin C, cytosine arabinoside, daunorubisin, and phenoxyacetamide derivatives of doxorubicin.

[0728] Drug Screening

[0729] Further contemplated is the use of the polypeptides of the present invention, or the polynucleotides encoding these polypeptides, to screen for molecules which modify the activities of the polypeptides of the present invention. Such a method would include contacting the polypeptide of the present invention with a selected compound(s) suspected of having antagonist or agonist activity, and assaying the activity of these polypeptides following binding.

[0730] This invention is particularly useful for screening therapeutic compounds by using the polypeptides of the present invention, or binding fragments thereof, in any of a variety of drug screening techniques. The polypeptide or fragment employed in such a test may be affixed to a solid support, expressed on a cell surface, free in solution, or located intracellularly. One method of drug screening utilizes eukaryotic or prokaryotic host cells which are stably transformed with recombinant nucleic acids expressing the polypeptide or fragment. Drugs are screened against such transformed cells in competitive binding assays. One may measure, for example, the formulation of complexes between the agent being tested and a polypeptide of the present invention.

[0731] Thus, the present invention provides methods of screening for drugs or any other agents which affect activities mediated by the polypeptides of the present invention. These methods comprise contacting such an agent with a polypeptide of the present invention or a fragment thereof and assaying for the presence of a complex between the agent and the polypeptide or a fragment thereof, by methods well known in the art. In such a competitive binding assay, the agents to screen are typically labeled. Following incubation, free agent is separated from that present in bound form, and the amount of free or uncomplexed label is a measure of the ability of a particular agent to bind to the polypeptides of the present invention.

[0732] Another technique for drug screening provides high throughput screening for compounds having suitable binding affinity to the polypeptides of the present invention, and is described in great detail in European Patent Application 84/03564, published on Sep. 13, 1984, which is incorporated herein by reference herein. Briefly stated, large numbers of different small peptide test compounds are synthesized on a solid substrate, such as plastic pins or some other surface. The peptide test compounds are reacted with polypeptides of the present invention and washed. Bound polypeptides are then detected by methods well known in the art. Purified polypeptides are coated directly onto plates for use in the aforementioned drug screening techniques. In addition, non-neutralizing antibodies may be used to capture the peptide and immobilize it on the solid support.

[0733] This invention also contemplates the use of competitive drug screening assays in which neutralizing antibodies capable of binding polypeptides of the present invention specifically compete with a test compound for binding to the polypeptides or fragments thereof. In this manner, the antibodies are used to detect the presence of any peptide which shares one or more antigenic epitopes with a polypeptide of the invention.

[0734] Antisense And Ribozyme (Antagonists)

[0735] In specific embodiments, antagonists according to the present invention are nucleic acids corresponding to the sequences contained in SEQ ID NO:X, or the complementary strand thereof, and/or to nucleotide sequences contained in the cDNA contained in the related cDNA clone identified in Table 1. In one embodiment, antisense sequence is generated internally, by the organism, in another embodiment, the antisense sequence is separately administered (see, for example, O'Connor, J., Neurochem. 56:560 (1991). Oligodeoxynucleotides as Antisense Inhibitors of Gene Expression, CRC Press, Boca Raton, Fla. (1988). Antisense technology can be used to control gene expression through antisense DNA or RNA, or through triple-helix formation. Antisense techniques are discussed for example, in Okano, J., Neurochem. 56:560 (1991); Oligodeoxynucleotides as Antisense Inhibitors of Gene Expression, CRC Press, Boca Raton, Fla. (1988). Triple helix formation is discussed in, for instance, Lee et al., Nucleic Acids Research 6:3073 (1979); Cooney et al., Science 241:456 (1988); and Dervan et al., Science 251:1300 (1991). The methods are based on binding of a polynucleotide to a complementary DNA or RNA.

[0736] For example, the use of c-myc and c-myb antisense RNA constructs to inhibit the growth of the non-lymphocytic leukemia cell line HL-60 and other cell lines was previously described. (Wickstrom et al. (1988); Anfossi et al. (1989)). These experiments were performed in vitro by incubating cells with the oligoribonucleotide. A similar procedure for in vivo use is described in WO 91/15580. Briefly, a pair of oligonucleotides for a given antisense RNA is produced as follows: A sequence complimentary to the first 15 bases of the open reading frame is flanked by an EcoR1 site on the 5 end and a HindIII site on the 3 end. Next, the pair of oligonucleotides is heated at 90° C. for one minute and then annealed in 2× ligation buffer (20 mM TRIS HCl pH 7.5, 10 mM MgCl2, 10 MM dithiothreitol (DTT) and 0.2 mM ATP) and then ligated to the EcoR1/Hind III site of the retroviral vector PMV7 (WO 91/15580).

[0737] For example, the 5′ coding portion of a polynucleotide that encodes the polypeptide of the present invention may be used to design an antisense RNA oligonucleotide of from about 10 to 40 base pairs in length. A DNA oligonucleotide is designed to be complementary to a region of the gene involved in transcription thereby preventing transcription and the production of the receptor. The antisense RNA oligonucleotide hybridizes to the mRNA in vivo and blocks translation of the mRNA molecule into receptor polypeptide.

[0738] In one embodiment, the antisense nucleic acid of the invention is produced intracellularly by transcription from an exogenous sequence. For example, a vector or a portion thereof, is transcribed, producing an antisense nucleic acid (RNA) of the invention. Such a vector would contain a sequence encoding the antisense nucleic acid. Such a vector can remain episomal or become chromosomally integrated, as long as it can be transcribed to produce the desired antisense RNA. Such vectors can be constructed by recombinant DNA technology methods standard in the art. Vectors can be plasmid, viral, or others known in the art, used for replication and expression in vertebrate cells. Expression of the sequence encoding the polypeptide of the present invention or fragments thereof, can be by any promoter known in the art to act in vertebrate, preferably human cells. Such promoters can be inducible or constitutive. Such promoters include, but are not limited to, the SV40 early promoter region (Bernoist and Chambon, Nature 29:304-310 (1981), the promoter contained in the 3′ long terminal repeat of Rous sarcoma virus (Yamamoto et al., Cell 22:787-797 (1980), the herpes thymidine promoter (Wagner et al., Proc. Natl. Acad. Sci. U.S.A. 78:1441-1445 (1981), the regulatory sequences of the metallothionein gene (Brinster, et al., Nature 296:39-42 (1982)), etc.

[0739] The antisense nucleic acids of the invention comprise a sequence complementary to at least a portion of an RNA transcript of a gene of the present invention. However, absolute complementary, although preferred, is not required. A sequence “complementary to at least a portion of an RNA,” referred to herein, means a sequence having sufficient complementary to be able to hybridize with the RNA, forming a stable duplex; in the case of double stranded antisense nucleic acids, a single strand of the duplex DNA may thus be tested, or triplex formation may be assayed. The ability to hybridize will depend on both the degree of complementary and the length of the antisense nucleic acid. Generally, the larger the hybridizing nucleic acid, the more base mismatches with a RNA it may contain and still form a stable duplex (or triplex as the case may be). One skilled in the art can ascertain a tolerable degree of mismatch by use of standard procedures to determine the melting point of the hybridized complex.

[0740] Oligonucleotides that are complementary to the 5′ end of the message, e.g., the 5′ untranslated sequence up to and including the AUG initiation codon, should work most efficiently at inhibiting translation. However, sequences complementary to the 3′ untranslated sequences of mRNAs have been shown to be effective at inhibiting translation of mRNAs as well. See generally, Wagner, R., 1994, Nature 372:333-335. Thus, oligonucleotides complementary to either the 5′- or 3′-non-translated, non-coding regions of polynucleotide sequences described herein could be used in an antisense approach to inhibit translation of endogenous mRNA. Oligonucleotides complementary to the 5′ untranslated region of the mRNA should include the complement of the AUG start codon. Antisense oligonucleotides complementary to mRNA coding regions are less efficient inhibitors of translation but could be used in accordance with the invention. Whether designed to hybridize to the 5′-, 3′- or coding region of mRNA of the present invention, antisense nucleic acids should be at least six nucleotides in length, and are preferably oligonucleotides ranging from 6 to about 50 nucleotides in length. In specific aspects the oligonucleotide is at least 10 nucleotides, at least 17 nucleotides, at least 25 nucleotides or at least 50 nucleotides.

[0741] The polynucleotides of the invention can be DNA or RNA or chimeric mixtures or derivatives or modified versions thereof, single-stranded or double-stranded. The oligonucleotide can be modified at the base moiety, sugar moiety, or phosphate backbone, for example, to improve stability of the molecule, hybridization, etc. The oligonucleotide may include other appended groups such as peptides (e.g., for targeting host cell receptors in vivo), or agents facilitating transport across the cell membrane (see, e.g., Letsinger et al., 1989, Proc. Natl. Acad. Sci. U.S.A. 86:6553-6556; Lemaitre et al., 1987, Proc. Natl. Acad. Sci. 84:648-652; PCT Publication No. WO88/09810, published Dec. 15, 1988) or the blood-brain barrier (see, e.g., PCT Publication No. WO89/10134, published Apr. 25, 1988), hybridization-triggered cleavage agents. (See, e.g., Krol et al., 1988, BioTechniques 6:958-976) or intercalating agents. (See, e.g., Zon, 1988. Pharm. Res. 5:539-549). To this end, the oligonucleotide may be conjugated to another molecule, e.g., a peptide, hybridization triggered cross-linking agent, transport agent, hybridization-triggered cleavage agent, etc.

[0742] The antisense oligonucleotide may comprise at least one modified base moiety which is selected from the group including, but not limited to, 5-fluorouracil, 5-bromouracil, 5-chlorouracil, 5-iodouracil, hypoxanthine, xantine, 4-acetylcytosine, 5-(carboxyhydroxylmethyl) uracil, 5-carboxymethylaminomethyl-2-thiouridine, 5-carboxymethylaminomethyluracil, dihydrouracil, beta-D-galactosylqueosine, inosine, N6-isopentenyladenine, 1-methylguanine, 1-methylinosine, 2,2-dimethylguanine, 2-methyladenine, 2-methylguanine, 3-methylcytosine, 5-methylcytosine, N6-adenine, 7-methylguanine, 5-methylaminomethyluracil, 5-methoxyaminomethyl-2-thiouracil, beta-D-mannosylqueosine, 5′-methoxycarboxymethyluracil, 5-methoxyuracil, 2-methylthio-N6-isopentenyladenine, uracil-5-oxyacetic acid (v), wybutoxosine, pseudouracil, queosine, 2-thiocytosine, 5-methyl-2-thiouracil, 2-thiouracil, 4-thiouracil, 5-methyluracil, uracil-5-oxyacetic acid methylester, uracil-5-oxyacetic acid (v), 5-methyl-2-thiouracil, 3-(3-amino-3-N-2-carboxypropyl) uracil, (acp3)w, and 2,6-diaminopurine.

[0743] The antisense oligonucleotide may also comprise at least one modified sugar moiety selected from the group including, but not limited to, arabinose, 2-fluoroarabinose, xylulose, and hexose.

[0744] In yet another embodiment, the antisense oligonucleotide comprises at least one modified phosphate backbone selected from the group including, but not limited to, a phosphorothioate, a phosphorodithioate, a phosphoramidothioate, a phosphoramidate, a phosphordiamidate, a methylphosphonate, an alkyl phosphotriester, and a formacetal or analog thereof.

[0745] In yet another embodiment, the antisense oligonucleotide is an a-anomeric oligonucleotide. An a-anomeric oligonucleotide forms specific double-stranded hybrids with complementary RNA in which, contrary to the usual b-units, the strands run parallel to each other (Gautier et al., 1987, Nucl. Acids Res. 15:6625-6641). The oligonucleotide is a 2′-0-methylribonucleotide (Inoue et al., 1987, Nucl. Acids Res. 15:6131-6148), or a chimeric RNA-DNA analogue (Inoue et al., 1987, FEBS Lett. 215:327-330).

[0746] Polynucleotides of the invention may be synthesized by standard methods known in the art, e.g. by use of an automated DNA synthesizer (such as are commercially available from Biosearch, Applied Biosystems, etc.). As examples, phosphorothioate oligonucleotides may be synthesized by the method of Stein et al. (1988, Nucl. Acids Res. 16:3209), methylphosphonate oligonucleotides can be prepared by use of controlled pore glass polymer supports (Sarin et al., 1988, Proc. Natl. Acad. Sci. U.S.A. 85:7448-7451), etc.

[0747] While antisense nucleotides complementary to the coding region sequence could be used, those complementary to the transcribed untranslated region are most preferred.

[0748] Potential antagonists according to the invention also include catalytic RNA, or a ribozyme (See, e.g., PCT International Publication WO 90/11364, published Oct. 4, 1990; Sarver et al, Science 247:1222-1225 (1990). While ribozymes that cleave mRNA at site specific recognition sequences can be used to destroy mRNAs, the use of hammerhead ribozymes is preferred. Hammerhead ribozymes cleave mRNAs at locations dictated by flanking regions that form complementary base pairs with the target mRNA. The sole requirement is that the target mRNA have the following sequence of two bases: 5′-UG-3′. The construction and production of hammerhead ribozymes is well known in the art and is described more fully in Haseloff and Gerlach, Nature 334:585-591 (1988). There are numerous potential hammerhead ribozyme cleavage sites within the nucleotide sequence of SEQ ID NO:X. Preferably, the ribozyme is engineered so that the cleavage recognition site is located near the 5′ end of the mRNA; i.e., to increase efficiency and minimize the intracellular accumulation of non-functional mRNA transcripts.

[0749] As in the antisense approach, the ribozymes of the invention can be composed of modified oligonucleotides (e.g. for improved stability, targeting, etc.) and should be delivered to cells which express in vivo. DNA constructs encoding the ribozyme may be introduced into the cell in the same manner as described above for the introduction of antisense encoding DNA. A preferred method of delivery involves using a DNA construct “encoding” the ribozyme under the control of a strong constitutive promoter, such as, for example, pol III or pol II promoter, so that transfected cells will produce sufficient quantities of the ribozyme to destroy endogenous messages and inhibit translation. Since ribozymes unlike antisense molecules, are catalytic, a lower intracellular concentration is required for efficiency.

[0750] Antagonist/agonist compounds may be employed to inhibit the cell growth and proliferation effects of the polypeptides of the present invention on neoplastic cells and tissues, i.e. stimulation of angiogenesis of tumors, and, therefore, retard or prevent abnormal cellular growth and proliferation, for example, in tumor formation or growth.

[0751] The antagonist/agonist may also be employed to prevent hyper-vascular diseases, and prevent the proliferation of epithelial lens cells after extracapsular cataract surgery. Prevention of the mitogenic activity of the polypeptides of the present invention may also be desirous in cases such as restenosis after balloon angioplasty.

[0752] The antagonist/agonist may also be employed to prevent the growth of scar tissue during wound healing.

[0753] The antagonist/agonist may also be employed to treat the diseases described herein.

[0754] Thus, the invention provides a method of treating disorders or diseases, including but not limited to the disorders or diseases listed throughout this application, associated with overexpression of a polynucleotide of the present invention by administering to a patient (a) an antisense molecule directed to the polynucleotide of the present invention, and/or (b) a ribozyme directed to the polynucleotide of the present invention.

[0755] Binding Peptides and Other Molecules

[0756] The invention also encompasses screening methods for identifying polypeptides and nonpolypeptides that bind prostate cancer antigen polypeptides, and the prostate cancer antigen binding molecules identified thereby. These binding molecules are useful, for example, as agonists and antagonists of the prostate cancer antigen polypeptides. Such agonists and antagonists can be used, in accordance with the invention, in the therapeutic embodiments described in detail, below.

[0757] This method comprises the steps of:

[0758] contacting prostate cancer antigen polypeptides or prostate cancer antigen-like polypeptides with a plurality of molecules; and

[0759] identifying a molecule that binds the prostate cancer antigen polypeptides or prostate cancer antigen-like polypeptides.

[0760] The step of contacting the prostate cancer antigen polypeptides or prostate cancer antigen-like polypeptides with the plurality of molecules may be effected in a number of ways. For example, one may contemplate immobilizing the prostate cancer antigen polypeptides or prostate cancer antigen-like polypeptides on a solid support and bringing a solution of the plurality of molecules in contact with the immobilized prostate cancer antigen polypeptides or prostate cancer antigen-like polypeptides. Such a procedure would be akin to an affinity chromatographic process, with the affinity matrix being comprised of the immobilized prostate cancer antigen polypeptides or prostate cancer antigen-like polypeptides. The molecules having a selective affinity for the prostate cancer antigen polypeptides or prostate cancer antigen-like polypeptides can then be purified by affinity selection. The nature of the solid support, process for attachment of the prostate cancer antigen polypeptides or prostate cancer antigen-like polypeptides to the solid support, solvent, and conditions of the affinity isolation or selection are largely conventional and well known to those of ordinary skill in the art.

[0761] Alternatively, one may also separate a plurality of polypeptides into substantially separate fractions comprising a subset of or individual polypeptides. For instance, one can separate the plurality of polypeptides by gel electrophoresis, column chromatography, or like method known to those of ordinary skill for the separation of polypeptides. The individual polypeptides can also be produced by a transformed host cell in such a way as to be expressed on or about its outer surface (e.g., a recombinant phage). Individual isolates can then be “probed” by the prostate cancer antigen polypeptides or prostate cancer antigen-like polypeptides, optionally in the presence of an inducer should one be required for expression, to determine if any selective affinity interaction takes place between the prostate cancer antigen polypeptides or prostate cancer antigen-like polypeptides and the individual clone. Prior to contacting the prostate cancer antigen polypeptides or prostate cancer antigen-like polypeptides with each fraction comprising individual polypeptides, the polypeptides could first be transferred to a solid support for additional convenience. Such a solid support may simply be a piece of filter membrane, such as one made of nitrocellulose or nylon. In this manner, positive clones could be identified from a collection of transformed host cells of an expression library, which harbor a DNA construct encoding a polypeptide having a selective affinity for prostate cancer antigen polypeptides or prostate cancer antigen-like polypeptides. Furthermore, the amino acid sequence of the polypeptide having a selective affinity for the prostate cancer antigen polypeptides or prostate cancer antigen-like polypeptides can be determined directly by conventional means or the coding sequence of the DNA encoding the polypeptide can frequently be determined more conveniently. The primary sequence can then be deduced from the corresponding DNA sequence. If the amino acid sequence is to be determined from the polypeptide itself, one may use microsequencing techniques. The sequencing technique may include mass spectroscopy.

[0762] In certain situations, it may be desirable to wash away any unbound prostate cancer antigen polypeptides or prostate cancer antigen-like polypeptides, or alternatively, unbound polypeptides, from a mixture of the prostate cancer antigen polypeptides or prostate cancer antigen-like polypeptides and the plurality of polypeptides prior to attempting to determine or to detect the presence of a selective affinity interaction. Such a wash step may be particularly desirable when the prostate cancer antigen polypeptides or prostate cancer antigen-like polypeptides or the plurality of polypeptides is bound to a solid support.

[0763] The plurality of molecules provided according to this method may be provided by way of diversity libraries, such as random or combinatorial peptide or nonpeptide libraries which can be screened for molecules that specifically bind prostate cancer antigen polypeptides. Many libraries are known in the art that can be used, e.g., chemically synthesized libraries, recombinant (e.g., phage display libraries), and in vitro translation-based libraries. Examples of chemically synthesized libraries are described in Fodor et al., 1991, Science 251:767-773; Houghten et al., 1991, Nature 354:84-86; Lam et al., 1991, Nature 354:82-84; Medynski, 1994, Bio/Technology 12:709-710;Gallop et al., 1994, J. Medicinal Chemistry 37(9):1233-1251; Ohlmeyer et al., 1993, Proc. Natl. Acad. Sci. USA 90:10922-10926; Erb et al., 1994, Proc. Natl. Acad. Sci. USA 91:11422-11426; Houghten et al., 1992, Biotechniques 13:412; Jayawickreme et al., 1994, Proc. Natl. Acad. Sci. USA 91:1614-1618; Salmon et al., 1993, Proc. Natl. Acad. Sci. USA 90:11708-11712; PCT Publication No. WO 93/20242; and Brenner and Lerner, 1992, Proc. Natl. Acad. Sci. USA 89:5381-5383.

[0764] Examples of phage display libraries are described in Scott and Smith, 1990, Science 249:386-390; Devlin et al., 1990, Science, 249:404-406; Christian, R. B., et al., 1992, J. Mol. Biol. 227:711-718); Lenstra, 1992, J. Immunol. Meth. 152:149-157; Kay et al., 1993, Gene 128:59-65; and PCT Publication No. WO 94/18318 dated Aug. 18, 1994.

[0765] In vitro translation-based libraries include but are not limited to those described in PCT Publication No. WO 91/05058 dated Apr. 18, 1991; and Mattheakis et al., 1994, Proc. Natl. Acad. Sci. USA 91:9022-9026.

[0766] By way of examples of nonpeptide libraries, a benzodiazepine library (see e.g., Bunin et al., 1994, Proc. Natl. Acad. Sci. USA 91:4708-4712) can be adapted for use. Peptoid libraries (Simon et al., 1992, Proc. Natl. Acad. Sci. USA 89:9367-9371) can also be used. Another example of a library that can be used, in which the amide functionalities in peptides have been permethylated to generate a chemically transformed combinatorial library, is described by Ostresh et al. (1994, Proc. Natl. Acad. Sci. USA 91:11138-11142).

[0767] The variety of non-peptide libraries that are useful in the present invention is great. For example, Ecker and Crooke, 1995, Bio/Technology 13:351-360 list benzodiazepines, hydantoins, piperazinediones, biphenyls, sugar analogs, beta-mercaptoketones, arylacetic acids, acylpiperidines, benzopyrans, cubanes, xanthines, aminimides, and oxazolones as among the chemical species that form the basis of various libraries.

[0768] Non-peptide libraries can be classified broadly into two types: decorated monomers and oligomers. Decorated monomer libraries employ a relatively simple scaffold structure upon which a variety functional groups is added. Often the scaffold will be a molecule with a known useful pharmacological activity. For example, the scaffold might be the benzodiazepine structure.

[0769] Non-peptide oligomer libraries utilize a large number of monomers that are assembled together in ways that create new shapes that depend on the order of the monomers. Among the monomer units that have been used are carbamates, pyrrolinones, and morpholinos. Peptoids, peptide-like oligomers in which the side chain is attached to the alpha amino group rather than the alpha carbon, form the basis of another version of non-peptide oligomer libraries. The first non-peptide oligomer libraries utilized a single type of monomer and thus contained a repeating backbone. Recent libraries have utilized more than one monomer, giving the libraries added flexibility.

[0770] Screening the libraries can be accomplished by any of a variety of commonly known methods. See, e.g., the following references, which disclose screening of peptide libraries: Parmley and Smith, 1989, Adv. Exp. Med. Biol. 251:215-218; Scott and Smith, 1990, Science 249:386-390; Fowlkes et al., 1992; BioTechniques 13:422-427; Oldenburg et al., 1992, Proc. Natl. Acad. Sci. USA 89:5393-5397; Yu et al., 1994, Cell 76:933-945; Staudt et al., 1988, Science 241:577-580; Bock et al., 1992, Nature 355:564-566; Tuerk et al., 1992, Proc. Natl. Acad. Sci. USA 89:6988-6992; Ellington et al., 1992, Nature 355:850-852; U.S. Pat. Nos. 5,096,815, 5,223,409, and 5,198,346, all to Ladner et al.; Rebar and Pabo, 1993, Science 263:671-673; and CT Publication No. WO 94/18318.

[0771] In a specific embodiment, screening to identify a molecule that binds prostate cancer antigen polypeptides can be carried out by contacting the library members with a prostate cancer antigen polypeptides or prostate cancer antigen-like polypeptides immobilized on a solid phase and harvesting those library members that bind to the prostate cancer antigen polypeptides or prostate cancer antigen-like polypeptides. Examples of such screening methods, termed “panning” techniques are described by way of example in Parmley and Smith, 1988, Gene 73:305-318; Fowlkes et al., 1992, BioTechniques 13:422-427; International Publication No. WO 94/18318; and in references cited herein.

[0772] In another embodiment, the two-hybrid system for selecting interacting proteins in yeast (Fields and Song, 1989, Nature 340:245-246; Chien et al., 1991, Proc. Natl. Acad. Sci. USA 88:9578-9582) can be used to identify molecules that specifically bind to prostate cancer antigen polypeptides or prostate cancer antigen-like polypeptides.

[0773] Where the prostate cancer antigen binding molecule is a polypeptide, the polypeptide can be conveniently selected from any peptide library, including random peptide libraries, combinatorial peptide libraries, or biased peptide libraries. The term “biased” is used herein to mean that the method of generating the library is manipulated so as to restrict one or more parameters that govern the diversity of the resulting collection of molecules, in this case peptides.

[0774] Thus, a truly random peptide library would generate a collection of peptides in which the probability of finding a particular amino acid at a given position of the peptide is the same for all 20 amino acids. A bias can be introduced into the library, however, by specifying, for example, that a lysine occurs every fifth amino acid or that positions 4, 8, and 9 of a decapeptide library be fixed to include only arginine. Clearly, many types of biases can be contemplated, and the present invention is not restricted to any particular bias. Furthermore, the present invention contemplates specific types of peptide libraries, such as phage displayed peptide libraries and those that utilize a DNA construct comprising a lambda phage vector with a DNA insert.

[0775] As mentioned above, in the case of a prostate cancer antigen binding molecule that is a polypeptide, the polypeptide may have about 6 to less than about 60 amino acid residues, preferably about 6 to about 10 amino acid residues, and most preferably, about 6 to about 22 amino acids. In another embodiment, a prostate cancer antigen binding polypeptide has in the range of 15-100 amino acids, or 20-50 amino acids.

[0776] The selected prostate cancer antigen binding polypeptide can be obtained by chemical synthesis or recombinant expression.

[0777] Other Activities

[0778] A polypeptide, polynucleotide, agonist, or antagonist of the present invention, as a result of the ability to stimulate vascular endothelial cell growth, may be employed in treatment for stimulating re-vascularization of ischemic tissues due to various disease conditions such as thrombosis, arteriosclerosis, and other cardiovascular conditions. The polypeptide, polynucleotide, agonist, or antagonist of the present invention may also be employed to stimulate angiogenesis and limb regeneration, as discussed above.

[0779] A polypeptide, polynucleotide, agonist, or antagonist of the present invention may also be employed for treating wounds due to injuries, burns, post-operative tissue repair, and ulcers since they are mitogenic to various cells of different origins, such as fibroblast cells and skeletal muscle cells, and therefore, facilitate the repair or replacement of damaged or diseased tissue.

[0780] A polypeptide, polynucleotide, agonist, or antagonist of the present invention may also be employed stimulate neuronal growth and to treat and prevent neuronal damage which occurs in certain neuronal disorders or neuro-degenerative conditions such as Alzheimer's disease, Parkinson's disease, and AIDS-related complex. A polypeptide, polynucleotide, agonist, or antagonist of the present invention may have the ability to stimulate chondrocyte growth, therefore, they may be employed to enhance bone and periodontal regeneration and aid in tissue transplants or bone grafts.

[0781] A polypeptide, polynucleotide, agonist, or antagonist of the present invention may be also be employed to prevent skin aging due to sunburn by stimulating keratinocyte growth.

[0782] A polypeptide, polynucleotide, agonist, or antagonist of the present invention may also be employed for preventing hair loss, since FGF family members activate hair-forming cells and promotes melanocyte growth. Along the same lines, a polypeptide, polynucleotide, agonist, or antagonist of the present invention may be employed to stimulate growth and differentiation of hematopoietic cells and bone marrow cells when used in combination with other cytokines.

[0783] A polypeptide, polynucleotide, agonist, or antagonist of the present invention may also be employed to maintain organs before transplantation or for supporting cell culture of primary tissues. A polypeptide, polynucleotide, agonist, or antagonist of the present invention may also be employed for inducing tissue of mesodermal origin to differentiate in early embryos.

[0784] A polypeptide, polynucleotide, agonist, or antagonist of the present invention may also increase or decrease the differentiation or proliferation of embryonic stem cells, besides, as discussed above, hematopoietic lineage.

[0785] A polypeptide, polynucleotide, agonist, or antagonist of the present invention may also be used to modulate mammalian characteristics, such as body height, weight, hair color, eye color, skin, percentage of adipose tissue, pigmentation, size, and shape (e.g., cosmetic surgery). Similarly, a polypeptide, polynucleotide, agonist, or antagonist of the present invention may be used to modulate mammalian metabolism affecting catabolism, anabolism, processing, utilization, and storage of energy.

[0786] A polypeptide, polynucleotide, agonist, or antagonist of the present invention may be used to change a mammal's mental state or physical state by influencing biorhythms, caricadic rhythms, depression (including depressive disorders), tendency for violence, tolerance for pain, reproductive capabilities (preferably by Activin or Inhibin-like activity), hormonal or endocrine levels, appetite, libido, memory, stress, or other cognitive qualities.

[0787] A polypeptide, polynucleotide, agonist, or antagonist of the present invention may also be used as a food additive or preservative, such as to increase or decrease storage capabilities, fat content, lipid, protein, carbohydrate, vitamins, minerals, cofactors or other nutritional components.

[0788] The above-recited applications have uses in a wide variety of hosts. Such hosts include, but are not limited to, human, murine, rabbit, goat, guinea pig, camel, horse, mouse, rat, hamster, pig, micro-pig, chicken, goat, cow, sheep, dog, cat, non-human primate, and human. In specific embodiments, the host is a mouse, rabbit, goat, guinea pig, chicken, rat, hamster, pig, sheep, dog or cat. In preferred embodiments, the host is a mammal. In most preferred embodiments, the host is a human.

[0789] Other Preferred Embodiments

[0790] Other preferred embodiments of the claimed invention include an isolated nucleic acid molecule comprising a nucleotide sequence which is at least 95% identical to a sequence of at least about 50 contiguous nucleotides in the nucleotide sequence of SEQ ID NO:X or the complementary strand thereto, and/or the cDNA in the related cDNA clone contained in the deposit.

[0791] Also preferred is a nucleic acid molecule wherein said sequence of contiguous nucleotides is included in the nucleotide sequence of SEQ ID NO:X in the range of positions identified as “Start” and “End” in columns 7 and 8 as defined for SEQ ID NO:X in Table 1.

[0792] Also preferred is an isolated nucleic acid molecule comprising a nucleotide sequence which is at least 95% identical to a sequence of at least about 150 contiguous nucleotides in the nucleotide sequence of SEQ ID NO:X or the complementary strand thereto, and/or the cDNA in the related cDNA clone contained in the deposit.

[0793] Further preferred is an isolated nucleic acid molecule comprising a nucleotide sequence which is at least 95% identical to a sequence of at least about 500 contiguous nucleotides in the nucleotide sequence of SEQ ID NO:X or the complementary strand thereto, and/or the cDNA in the related cDNA clone contained in the deposit.

[0794] A further preferred embodiment is a nucleic acid molecule comprising a nucleotide sequence which is at least 95% identical to the nucleotide sequence of SEQ ID NO:X in the range of positions identified as “Start” and “End” in columns 7 and 8 as defined for SEQ ID NO:X in Table 1.

[0795] A further preferred embodiment is an isolated nucleic acid molecule comprising a nucleotide sequence which is at least 95% identical to the complete nucleotide sequence of SEQ ID NO:X or the complementary strand thereto, and/or the cDNA in the related cDNA clone contained in the deposit.

[0796] Also preferred is an isolated nucleic acid molecule which hybridizes under stringent hybridization conditions to a nucleic acid molecule comprising a nucleotide sequence of SEQ ID NO:X or the complementary strand thereto, and/or the cDNA in the related cDNA clone contained in the deposit, wherein said nucleic acid molecule which hybridizes does not hybridize under stringent hybridization conditions to a nucleic acid molecule having a nucleotide sequence consisting of only A residues or of only T residues.

[0797] Also preferred is a composition of matter comprising a DNA molecule which comprises a cDNA clone contained in the deposit.

[0798] Also preferred is an isolated nucleic acid molecule comprising a nucleotide sequence which is at least 95% identical to a sequence of at least 50 contiguous nucleotides in the nucleotide sequence of the cDNA in the related cDNA clone contained in the deposit.

[0799] Also preferred is an isolated nucleic acid molecule, wherein said sequence of at least 50 contiguous nucleotides is included in the nucleotide sequence of an open reading frame sequence encoded by the cDNA in the related cDNA clone contained in the deposit.

[0800] Also preferred is an isolated nucleic acid molecule comprising a nucleotide sequence which is at least 95% identical to sequence of at least 150 contiguous nucleotides in the nucleotide sequence encoded by the cDNA in the related cDNA clone contained in the deposit.

[0801] A further preferred embodiment is an isolated nucleic acid molecule comprising a nucleotide sequence which is at least 95% identical to sequence of at least 500 contiguous nucleotides in the nucleotide sequence encoded by the cDNA in the related cDNA clone contained in the deposit.

[0802] A further preferred embodiment is an isolated nucleic acid molecule comprising a nucleotide sequence which is at least 95% identical to the complete nucleotide sequence encoded by the cDNA in the related cDNA clone contained in the deposit.

[0803] A further preferred embodiment is a method for detecting in a biological sample a nucleic acid molecule comprising a nucleotide sequence which is at least 95% identical to a sequence of at least 50 contiguous nucleotides in a sequence selected from the group consisting of: a nucleotide sequence of SEQ ID NO:X or the complementary strand thereto; and a nucleotide sequence encoded by the cDNA in the related cDNA clone contained in the deposit; which method comprises a step of comparing a nucleotide sequence of at least one nucleic acid molecule in said sample with a sequence selected from said group and determining whether the sequence of said nucleic acid molecule in said sample is at least 95% identical to said selected sequence.

[0804] Also preferred is the above method wherein said step of comparing sequences comprises determining the extent of nucleic acid hybridization between nucleic acid molecules in said sample and a nucleic acid molecule comprising said sequence selected from said group. Similarly, also preferred is the above method wherein said step of comparing sequences is performed by comparing the nucleotide sequence determined from a nucleic acid molecule in said sample with said sequence selected from said group. The nucleic acid molecules can comprise DNA molecules or RNA molecules.

[0805] A further preferred embodiment is a method for identifying the species, tissue or cell type of a biological sample which method comprises a step of detecting nucleic acid molecules in said sample, if any, comprising a nucleotide sequence that is at least 95% identical to a sequence of at least 50 contiguous nucleotides in a sequence selected from the group consisting of: a nucleotide sequence of SEQ ID NO:X or the complementary strand thereto; and a nucleotide sequence encoded by the cDNA in the related cDNA clone contained in the deposit.

[0806] Also preferred is the above method for identifying the species, tissue or cell type of a biological sample which comprises a step of detecting nucleic acid molecules comprising a nucleotide sequence in a panel of at least two nucleotide sequences, wherein at least one sequence in said panel is at least 95% identical to a sequence of at least 50 contiguous nucleotides in a sequence selected from said group.

[0807] Also preferred is a method for diagnosing in a subject a pathological condition associated with abnormal structure or expression of a nucleotide sequence of SEQ ID NO:X; or the cDNA in the related cDNA clone identified in Table 1 which encodes a protein, wherein the method comprises a step of detecting in a biological sample obtained from said subject nucleic acid molecules, if any, comprising a nucleotide sequence that is at least 95% identical to a sequence of at least 50 contiguous nucleotides in a sequence selected from the group consisting of: a nucleotide sequence of SEQ ID NO:X or the complementary strand thereto; and a nucleotide sequence of the cDNA in the related cDNA clone contained in the deposit.

[0808] Also preferred is the above method for diagnosing a pathological condition which comprises a step of detecting nucleic acid molecules comprising a nucleotide sequence in a panel of at least two nucleotide sequences, wherein at least one sequence in said panel is at least 95% identical to a sequence of at least 50 contiguous nucleotides in a sequence selected from said group.

[0809] Also preferred is a composition of matter comprising isolated nucleic acid molecules wherein the nucleotide sequences of said nucleic acid molecules comprise a panel of at least two nucleotide sequences, wherein at least one sequence in said panel is at least 95% identical to a sequence of at least 50 contiguous nucleotides in a sequence selected from the group consisting of: a nucleotide sequence of SEQ ID NO:X or the complementary strand thereto; and a nucleotide sequence encoded by the cDNA in the related cDNA clone contained in the deposit. The nucleic acid molecules can comprise DNA molecules or RNA molecules.

[0810] Also preferred is a composition of matter comprising isolated nucleic acid molecules wherein the nucleotide sequences of said nucleic acid molecules comprise a DNA microarray or “chip” of at least 1, 2, 3, 4, 5, 6, 7, 8, 9, 10, 15, 20, 25, 30, 40, 50, 100, 150, 200, 250, 300, 500, 1000, 2000, 3000 or 4000 nucleotide sequences, wherein at least one sequence in said DNA microarray or “chip” is at least 95% identical to a sequence of at least 50 contiguous nucleotides in a sequence selected from the group consisting of: a nucleotide sequence of SEQ ID NO:X or the complementary strand thereto; and a nucleotide sequence encoded by the cDNA in the cDNA clone referenced in Table 1. The nucleic acid molecules can comprise DNA molecules or RNA molecules.

[0811] Also preferred is an isolated polypeptide comprising an amino acid sequence at least 90% identical to a sequence of at least about 10 contiguous amino acids in the polypeptide sequence of SEQ ID NO:Y; a polypeptide encoded by SEQ ID NO:X; and/or a polypeptide encoded by the cDNA in the related cDNA clone contained in the deposit.

[0812] Also preferred is an isolated polypeptide comprising an amino acid sequence at least 95% identical to a sequence of at least about 30 contiguous amino acids in the amino acid sequence of SEQ ID NO:Y; a polypeptide encoded by SEQ ID NO:X; and/or a polypeptide encoded by the cDNA in the related cDNA clone contained in the deposit.

[0813] Further preferred is an isolated polypeptide comprising an amino acid sequence at least 95% identical to a sequence of at least about 100 contiguous amino acids in the amino acid sequence of SEQ ID NO:Y; a polypeptide encoded by SEQ ID NO:X; and/or a polypeptide encoded by the cDNA in the related cDNA clone contained in the deposit.

[0814] Further preferred is an isolated polypeptide comprising an amino acid sequence at least 95% identical to the complete amino acid sequence of SEQ ID NO:Y; a polypeptide encoded by SEQ ID NO:X; and/or a polypeptide encoded by the cDNA in the related cDNA clone contained in the deposit.

[0815] Further preferred is an isolated polypeptide comprising an amino acid sequence at least 90% identical to a sequence of at least about 10 contiguous amino acids in the complete amino acid sequence of a polypeptide encoded by the cDNA clone referenced in Table 1.

[0816] Also preferred is a polypeptide wherein said sequence of contiguous amino acids is included in the amino acid sequence of a portion of said polypeptide encoded by the cDNA clone referenced in Table 1; a polypeptide encoded by SEQ ID NO:X; and/or the polypeptide sequence of SEQ ID NO:Y.

[0817] Also preferred is an isolated polypeptide comprising an amino acid sequence at least 95% identical to a sequence of at least about 30 contiguous amino acids in the amino acid sequence of a polypeptide encoded by the cDNA clone referenced in Table 1.

[0818] Also preferred is an isolated polypeptide comprising an amino acid sequence at least 95% identical to a sequence of at least about 100 contiguous amino acids in the amino acid sequence of a polypeptide encoded by the cDNA clone referenced in Table 1.

[0819] Also preferred is an isolated polypeptide comprising an amino acid sequence at least 95% identical to the amino acid sequence of a polypeptide encoded by the cDNA clone referenced in Table 1.

[0820] Further preferred is an isolated antibody which binds specifically to a polypeptide comprising an amino acid sequence that is at least 90% identical to a sequence of at least 10 contiguous amino acids in a sequence selected from the group consisting of: a polypeptide sequence of SEQ ID NO:Y; a polypeptide encoded by SEQ ID NO:X; and a polypeptide encoded by the cDNA in the related cDNA clone contained in the deposit.

[0821] Further preferred is a method for detecting in a biological sample a polypeptide comprising an amino acid sequence which is at least 90% identical to a sequence of at least 10 contiguous amino acids in a sequence selected from the group consisting of: a polypeptide sequence of SEQ ID NO:Y; a polypeptide encoded by SEQ ID NO:X; and a polypeptide encoded by the cDNA in the related cDNA clone referenced in Table 1; which method comprises a step of comparing an amino acid sequence of at least one polypeptide molecule in said sample with a sequence selected from said group and determining whether the sequence of said polypeptide molecule in said sample is at least 90% identical to said sequence of at least 10 contiguous amino acids.

[0822] Also preferred is the above method wherein said step of comparing an amino acid sequence of at least one polypeptide molecule in said sample with a sequence selected from said group comprises determining the extent of specific binding of polypeptides in said sample to an antibody which binds specifically to a polypeptide comprising an amino acid sequence that is at least 90% identical to a sequence of at least 10 contiguous amino acids in a sequence selected from the group consisting of: a polypeptide sequence of SEQ ID NO:Y; a polypeptide encoded by SEQ ID NO:X; and a polypeptide encoded by the cDNA in the related cDNA clone referenced in Table 1.

[0823] Also preferred is the above method wherein said step of comparing sequences is performed by comparing the amino acid sequence determined from a polypeptide molecule in said sample with said sequence selected from said group.

[0824] Also preferred is a method for identifying the species, tissue or cell type of a biological sample which method comprises a step of detecting polypeptide molecules in said sample, if any, comprising an amino acid sequence that is at least 90% identical to a sequence of at least 10 contiguous amino acids in a sequence selected from the group consisting of: polypeptide sequence of SEQ ID NO:Y; a polypeptide encoded by SEQ ID NO:X; and a polypeptide encoded by the cDNA in the related cDNA clone referenced in Table 1.

[0825] Also preferred is the above method for identifying the species, tissue or cell type of a biological sample, which method comprises a step of detecting polypeptide molecules comprising an amino acid sequence in a panel of at least two amino acid sequences, wherein at least one sequence in said panel is at least 90% identical to a sequence of at least 10 contiguous amino acids in a sequence selected from the above group.

[0826] Also preferred is a method for diagnosing in a subject a pathological condition associated with abnormal structure or expression of a nucleic acid sequence identified in Table 1 encoding a polypeptide, which method comprises a step of detecting in a biological sample obtained from said subject polypeptide molecules comprising an amino acid sequence in a panel of at least two amino acid sequences, wherein at least one sequence in said panel is at least 90% identical to a sequence of at least 10 contiguous amino acids in a sequence selected from the group consisting of: polypeptide sequence of SEQ ID NO:Y; a polypeptide encoded by SEQ ID NO:X; and a polypeptide encoded by the cDNA in the related cDNA clone referenced in Table 1.

[0827] In any of these methods, the step of detecting said polypeptide molecules includes using an antibody.

[0828] Also preferred is an isolated nucleic acid molecule comprising a nucleotide sequence which is at least 95% identical to a nucleotide sequence encoding a polypeptide wherein said polypeptide comprises an amino acid sequence that is at least 90% identical to a sequence of at least 10 contiguous amino acids in a sequence selected from the group consisting of: polypeptide sequence of SEQ ID NO:Y; a polypeptide encoded by SEQ ID NO:X; and a polypeptide encoded by the cDNA in the related cDNA clone referenced in Table 1.

[0829] Also preferred is an isolated nucleic acid molecule, wherein said nucleotide sequence encoding a polypeptide has been optimized for expression of said polypeptide in a prokaryotic host.

[0830] Also preferred is an isolated nucleic acid molecule, wherein said polypeptide comprises an amino acid sequence selected from the group consisting of: polypeptide sequence of SEQ ID NO:Y; a polypeptide encoded by SEQ ID NO:X; and a polypeptide encoded by the cDNA in the related cDNA clone referenced in Table 1.

[0831] Further preferred is a method of making a recombinant vector comprising inserting any of the above isolated nucleic acid molecule into a vector. Also preferred is the recombinant vector produced by this method. Also preferred is a method of making a recombinant host cell comprising introducing the vector into a host cell, as well as the recombinant host cell produced by this method.

[0832] Also preferred is a method of making an isolated polypeptide comprising culturing this recombinant host cell under conditions such that said polypeptide is expressed and recovering said polypeptide. Also preferred is this method of making an isolated polypeptide, wherein said recombinant host cell is a eukaryotic cell and said polypeptide is a human protein comprising an amino acid sequence selected from the group consisting of: polypeptide sequence of SEQ ID NO:Y; a polypeptide encoded by SEQ ID NO:X; and a polypeptide encoded by the cDNA in the related cDNA clone referenced in Table 1. The isolated polypeptide produced by this method is also preferred.

[0833] Also preferred is a method of treatment of an individual in need of an increased level of a protein activity, which method comprises administering to such an individual a Therapeutic comprising an amount of an isolated polypeptide, polynucleotide, immunogenic fragment or analogue thereof, binding agent, antibody, or antigen binding fragment of the claimed invention effective to increase the level of said protein activity in said individual.

[0834] Also preferred is a method of treatment of an individual in need of a decreased level of a protein activity, which method comprised administering to such an individual a Therapeutic comprising an amount of an isolated polypeptide, polynucleotide, immunogenic fragment or analogue thereof, binding agent, antibody, or antigen binding fragment of the claimed invention effective to decrease the level of said protein activity in said individual.

[0835] Having generally described the invention, the same will be more readily understood by reference to the following examples, which are provided by way of illustration and are not intended as limiting.

### EXAMPLES

### Example 1

[0836] Isolation of a Selected cDNA Clone from the Deposited Sample

[0837] Each deposited cDNA clone is contained in a plasmid vector. Table 5 identifies the vectors used to construct the cDNA library from which each clone was isolated. In many cases, the vector used to construct the library is a phage vector from which a plasmid has been excised. The following correlates the related plasmid for each phage vector used in constructing the cDNA library. For example, where a particular clone is identified in Table 5 as being isolated in the vector “Lambda Zap,” the corresponding deposited clone is in “pBluescript.”

| Vector Used to Construct Library | Corresponding Deposited Plasmid |
|---|---|
| Lambda Zap | pBluescript (pBS) |
| Uni-Zap XR | pBluescript (pBS) |
| Zap Express | pBK |
| lafmidBA | plafmid BA |
| pSport1 | pSport1 |
| pCMVSport 2.0 | pCMVSport 2.0 |
| pCMVSport 3.0 | pCMVSport 3.0 |
| pCR ® 2.1 | pCR ® 2.1 |

[0838] Vectors Lambda Zap (U.S. Pat. Nos. 5,128,256 and 5,286,636), Uni-Zap XR (U.S. Pat. Nos. 5,128,256 and 5,286,636), Zap Express (U.S. Pat. Nos. 5,128,256 and 5,286,636), pBluescript (pBS) (Short, J. M. et al., Nucleic Acids Res. 16:7583-7600 (1988); Alting-Mees, M. A. and Short, J. M., Nucleic Acids Res. 17:9494 (1989)) and pBK (Alting-Mees, M. A. et al., Strategies 5:58-61 (1992)) are commercially available from Stratagene Cloning Systems, Inc., 11011 N. Torrey Pines Road, La Jolla, Calif., 92037. pBS contains an ampicillin resistance gene and pBK contains a neomycin resistance gene. Both can be transformed into E. coli strain XL-1 Blue, also available from Stratagene. pBS comes in 4 forms SK+, SK−, KS+ and KS. The S and K refers to the orientation of the polylinker to the T7 and T3 primer sequences which flank the polylinker region (“S” is for SacI and “K” is for KpnI which are the first sites on each respective end of the linker). “+” or “−” refer to the orientation of the f1 origin of replication (“ori”), such that in one orientation, single stranded rescue initiated from the f1 ori generates sense strand DNA and in the other, antisense.

[0839] Vectors pSport1, pCMVSport 2.0 and pCMVSport 3.0, were obtained from Life Technologies, Inc., P.O. Box 6009, Gaithersburg, Md. 20897. All Sport vectors contain an ampicillin resistance gene and may be transformed into E. coli strain DH10B, also available from Life Technologies. (See, for instance, Gruber, C. E., et al., Focus 15:59 (1993).) Vector lafmid BA (Bento Soares, Columbia University, NY) contains an ampicillin resistance gene and can be transformed into E. coli strain XL-1 Blue. Vector pCR® 2.1, which is available from Invitrogen, 1600 Faraday Avenue, Carlsbad, Calif. 92008, contains an ampicillin resistance gene and may be transformed into E. coli strain DH10B, available from Life Technologies. (See, for instance, Clark, J. M., Nuc. Acids Res. 16:9677-9686 (1988) and Mead, D. et al., Bio/Technology 9: (1991).) Preferably, a polynucleotide of the present invention does not comprise the phage vector sequences identified for the particular clone in Table 5, as well as the corresponding plasmid vector sequences designated above.

[0840] The deposited material in the sample assigned the ATCC Deposit Number cited by reference to Table 2 and 5 for any given cDNA clone also may contain one or more additional plasmids, each comprising a cDNA clone different from that given clone. Thus, deposits sharing the same ATCC Deposit Number contain at least a plasmid for each cDNA clone referenced in Table 1.

TABLE 5

| | | | ATCC |
|---|---|---|---|
| Libraries owned by Catalog | Catalog Description | Vector | Deposit |
| HUKA HUKB HUKC HUKD HUKE | Human Uterine Cancer | Lambda ZAP II | LP01 |
| HUKF HUKG | | | |
| HCNA HCNB | Human Colon | Lambda Zap II | LP01 |
| HFFA | Human Fetal Brain, random primed | Lambda Zap II | LP01 |
| HTWA | Resting T-Cell | Lambda ZAP II | LP01 |
| HBQA | Early Stage Human Brain, random | Lambda ZAP II | LP01 |
| | primed | | |
| HLMB HLMF HLMG HLMH HLMI | breast lymph node CDNA library | Lambda ZAP II | LP01 |
| HLMJ HLMM HLMN | | | |
| HCQA HCQB | Human colon cancer | Lambda ZAP II | LP01 |
| HMEA HMEC HMED HMEE HMEF | Human Microvascular Endothelial Cells, | Lambda ZAP II | LP01 |
| HMEG HMEI HMEJ HMEK HMEL | fract. A | | |
| HUSA HUSC | Human Umbilical Vein Endothelial | Lambda ZAP II | LP01 |
| | Cells, fract A | | |
| HLQA HLQB | Hepatocellular Tumor | Lambda ZAP II | LP01 |
| HHGA HHGB HI-IGC HHGD | Hemangiopericytoma | Lambda ZAP II | LP01 |
| HSDM | Human Striatum Depression, re-rescue | Lambda ZAP II | LP01 |
| HUSH | Umbilical Vein Endothelial Cells, frac | Lambda ZAP II | LP01 |
| | A, re-excision | | |
| HSGS | Salivary gland, subtracted | Lambda ZAP II | LP01 |
| HFXA HFXB HFXC HFXD HFXE | Brain frontal cortex | Lambda ZAP II | LP01 |
| HFXF HFXG HFXH | | | |
| HPQA HPQB HPQC | PERM TF274 | Lambda ZAP II | LP01 |
| HFXJ HFXK | Brain Frontal Cortex, re-excision | Lambda ZAP II | LP01 |
| HCWA HCWB HCWC HCWD HCWE | CD34 positive cells (Cord Blood) | ZAP Express | LP02 |
| HCWF HCWG HCWH HCWI HCWJ | | | |
| HCWK | | | |
| HCUA HCUB HCUC | CD34 depleted Buffy Coat (Cord Blood) | ZAP Express | LP02 |
| HRSM | A-14 cell line | ZAP Express | LP02 |
| HRSA | A1-CELL LINE | ZAP Express | LP02 |
| HCUD HCUE HCUF HCUG HCUH | CD34 depleted Buffy Coat (Cord | ZAP Express | LP02 |
| HCUI | Blood), re-excision | | |
| HBXE HBXF HBXG | Whole Brain #2, re-excision | ZAP Express | LP02 |
| HRLM | L8 cell line | ZAP Express | LP02 |
| HBXA HBXB HBXC HBXD | Human Whole Brain #2- Oligo dT > | ZAP Express | LP02 |
| | 1.5Kb | | |
| HUDA HUDB HUDC | Testes | ZAP Express | LP02 |
| HHTM HHTN HHTO | H. hypothalamus, frac A;re-excision | ZAP Express | LP02 |
| HHTL | H. hypothalamus. frac A | ZAP Express | LP02 |
| HASA HASD | Human Adult Spleen | Uni-ZAP XR | LP03 |
| HFKC HFKD HFKE HFKF HFKG | Human Fetal Kidney | Uni-ZAP XR | LP03 |
| HE8A HE8B HE8C HE8D HE8E HE8F | Human 8 Week Whole Embryo | Uni-ZAP XR | LP03 |
| HE8M HE8N | | | |
| HGBA HGBD HGBE HGBF HGBG | Human Gall Bladder | Uni-ZAP XR | LP03 |
| HGBH HGBI | | | |
| HLHA HLHB HLHC HLHD HLHE | Human Fetal Lung III | Uni-ZAP XR | LP03 |
| HLHF HLHG HLHH HLHQ | | | |
| HPMA HPMB HPMC HPMD HPME | Human Placenta | Uni-ZAP XR | LP03 |
| HPMF HPMG HPMH | | | |
| HPRA HPRB HPRC HPRD | Human Prostate | Uni-ZAP XR | LP03 |
| HSIA HSIC HSID HSIE | Human Adult Small Intestine | Uni-ZAP XR | LP03 |
| HTEA HTEB HTEC HTED HTEE | Human Testes | Uni-ZAP XR | LP03 |
| HTEF HTEG HTEH HTEI HTEJ HTEK | | | |
| HTPA HTPB HTPC HTPD HTPE | Human Pancreas Tumor | Uni-ZAP XR | LP03 |
| HTTA HTTB HTTC HTTD HTTE | Human Testes Tumor Uni-ZAP XR | LP03 | |
| HTTF | | | |
| HAPA HAPB HAPC HAPM | Human Adult Pulmonary | Uni-ZAP XR | LP03 |
| HETA HETB HETC HETD HETE | Human Endometrial Tumor | Uni-ZAP XR | LP03 |
| HETF HETG HETH HETI | | | |
| HHFB HHFC HHFD HHFE HHFF | Human Fetal Heart | Uni-ZAP XR | LP03 |
| HHFG HHFH HHFI | | | |
| HHPB HHPC HHPD HHPE HHPF | Human Hippocampus | Uni-ZAP XR | LP03 |
| HHPG HHPH | | | |
| HCE1 HCE2 HCE3 HCE4 HCE5 HCEB | Human Cerebellum | Uni-ZAP XR | LP03 |
| HCEC HCED HCEE HCEF HCEG | | | |
| HUVB HUVC HUVD HUVE | Human Umbilical Vein, Endo. remake | Uni-ZAP XR | LP03 |
| HSTA HSTB HSTC HSTD | Human Skin Tumor | Uni-ZAP XR | LP03 |
| HTAA HTAB HTAC HTAD HTAE | Human Activated T-Cells | Uni-ZAP XR | LP03 |
| HFEA HFEB HFEC | Human Fetal Epithelium (Skin) | Uni-ZAP XR | LP03 |
| HIPA HJPB HJPC HJPD | HUMAN JURKAT MEMBRANE | Uni-ZAP XR | LP03 |
| | BOUND POLYSOMES | | |
| HESA | Human epithelioid sarcoma | Uni-Zap XR | LP03 |
| HLTA HLTB HLTC HLTD HLTE | Human T-Cell Lymphoma | Uni-ZAP XR | LP03 |
| HLTF | | | |
| HFTA HFTB HFTC HFTD | Human Fetal Dura Mater | Uni-ZAP XR | LP03 |
| HRDA HRDB HRDC HRDD HRDE | Human Rhabdomyosarcoma | Uni-ZAP XR | LP03 |
| HRDF | | | |
| HCAA HCAB HCAC | Cem cells cyclohexamide treated | Uni-ZAP XR | LP03 |
| HRGA HRGB HRGC HRGD | Raji Cells, cyclohexamide treated | Uni-ZAP XR | LP03 |
| HSUA HSUB HSUC HSUM | Supt Cells, cyclohexamide treated | Uni-ZAP XR | LP03 |
| HT4A HT4C HT4D | ctivated T-Cells, 12 hrs. | Uni-ZAP XR | LP03 |
| HE9A HE9B HE9C HE9D HE9E HE9F | Nine Week Old Early Stage Human | Uni-ZAP XR | LP03 |
| HE9G HE9H HE9M HE9N | | | |
| HATA HATB HATC HATD HATE | Hman Adrenal Gland Tumor | Uni-ZAP XR | LP03 |
| HT5A | Activated T-Cells, 24 hrs. | Uni-ZAP XR | LP03 |
| HFGA HFGM | Human Fetal Bran | Uni-ZAP XR | LP03 |
| HNEA HNEB HNEC HNED HNEE | Human Neutrophil | Uni-ZAP XR | LP03 |
| HBGB HBGD | Human Primary Breast Cancer | Uni-ZAP XR | LP03 |
| HBNA HBNB | Human Normal Breast | Uni-ZAP XR | LP03 |
| HCAS | Cem Cells, cyclohexamide treated, | Uni-ZAP XR | LP03 |
| | subtra | | |
| HHPS | Human Hippocampus, subtracted | pBS | LP03 |
| HKCS HKCU | Human Colon Cancer, subtracted | pBS | LP03 |
| HRGS | Raji cells, cyclohexamide treated, | pBS | LP03 |
| | subtracted | | |
| HSUT | Supt cells. cyclohexamide treated, | pBS | LP03 |
| | differentially expressed | | |
| HT4S | ctivated T-Cells, 12 hrs, subtracted | Uni-ZAP XR | LP03 |
| HCDA HCDB HCDC HCDD HCDE | Human Chondrosarcoma | Uni-ZAP XR | LP03 |
| HOAA HOAB HOAC | Human Osteosarcoma | Uni-ZAP XR | LP03 |
| HTLA HTLB HTLC HTLD HTLE | Human adult testis, large inserts | Uni-ZAP XR | LP03 |
| HTLF | | | |
| HLMA HLMC HLMD | Breast Lymph node cDNA library | Uni-ZAP XR | LP03 |
| H6EA H6EB H6EC | HL-60, PMA 4H | Uni-ZAP XR | LP03 |
| HTXA HTXB HTXC HTXD HTXE | Activated T-Cell (12hs)/Thiouridine | Uni-ZAP XR | LP03 |
| HTXF HTXG HTXH | labelledEco | | |
| HNFA HNFB HNFC HNFD HNFE | Human Neutrophil. Activated | Uni-ZAP XR | LP03 |
| HNFF HNFG HNFH HNFJ | | | |
| HTOB HTOC | HUMAN TONSILS, FRACTION 2 | Uni-ZAP XR | LP03 |
| HMGB | Human OB MG63 control fraction I | Uni-ZAP XR | LP03 |
| HOPB | Human OB HOS control fraction I | Uni-ZAP XR | LP03 |
| HORB | Human OB HOS treated (10 nM E2) | Uni-ZAP XR | LP03 |
| | fraction I | | |
| HSVA HSVB HSVC | Human Chronic Synovitis | Uni-ZAP XR | LP03 |
| HROA | HUMAN STOMACH | Uni-ZAP XR | LP03 |
| HBJA HBJB HBJC HBJD HBJE HBJF | HUMAN B CELL LYMPHOMA | Uni-ZAP XR | LP03 |
| HBJG HBJH HBJI HBJJ HBJK | | | |
| HCRA HCRB HCRC | Human corpus colosum | Uni-ZAP XR | LP03 |
| HODA HODB HODC HODD | Human ovarian cancer | Uni-ZAP XR | LP03 |
| HDSA | Dermatofibrosarcoma Protuberance | Uni-ZAP XR | LP03 |
| HMWA HMWB HMWC HMWD | Bone Marrow Cell Line (RS4;11) | Uni-ZAP XR | LP03 |
| HMWE HMWF HMWG HMWH | | | |
| HMWI HMWJ | | | |
| HSOA | stomach cancer (human) | Uni-ZAP XR | LP03 |
| HERA | SKIN | Uni-ZAP XR | LP03 |
| HMDA | Brain-medulloblastoma | Uni-ZAP XR | LP03 |
| HGLA HGLB HGLD | Glioblastoma | Uni-ZAP XR | LP03 |
| HEAA | H. Atrophic Endometrium | Uni-ZAP XR | LP03 |
| HBCA HBCB | H. Lymph node breast Cancer | Uni-ZAP XR | LP03 |
| HPWT | Human Prostate BPH, re-excision | Uni-ZAP XR | LP03 |
| HFVG HFVH HFVI | Fetal Liver, subtraction II | pBS | LP03 |
| HNFI | Human Neutrophuls, Activated, re- | pBS | LP03 |
| | excision | | |
| HBMB HBMC HBMD | Human Bone Marrow, re-excision | pBS | LP03 |
| HKML HKMM HKMN | H. Kidney Medulla, re-excision | pBS | LP03 |
| HKIX HKIY | H. Kidney Cortex, subtracted | pBS | LP03 |
| HADT | H. Amygdala Depression, subtracted | pBS | LP03 |
| H6AS | Hl-60, untreated, subtracted | Uni-ZAP XR | LP03 |
| H6ES | HL-60, PMA 4H, subtracted | Uni-ZAP XR | LP03 |
| H6BS | HL-60, RA 4h, Subtracted | Uni-ZAP XR | LP03 |
| H6CS | HL-60, PMA ld, subtracted | Uni-ZAP XR | LP03 |
| HTXJ HTXK | Activated T-cell(12h)IThiouridine-re- | Uni-ZAP XR | LP03 |
| | excision | | |
| HMSA HMSB HMSC HMSD HMSE | Monocyte activated | Uni-ZAP XR | LP03 |
| HMSF HMSG HMSH HMSI HMSJ | | | |
| HMSK | | | |
| HAGA HAGB HAGC HAGD HAGE | Human Amygdala | Uni-ZAP XR | LP03 |
| HAGF | | | |
| HSRA HSRB HSRE | STROMAL -OSTEOCLASTOMA | Uni-ZAP XR | LP03 |
| HSRD HSRF HSRG HSRH | Human Osteoclastoma Stromal Cells - | Uni-ZAP XR | LP03 |
| | unamplified | | |
| HSQA HSQB HSQC HSQD HSQE | Stromal cell TF274 | Uni-ZAP XR | LP03 |
| HSQF HSQG | | | |
| HSKA HSKB HSKC HSKD HSKE | Smooth muscle, serum treated | Uni-ZAP XR | LP03 |
| HSKF HSKZ | | | |
| HSLA HSLB HSLC HSLD HSLE HSLF | Smooth muscle,control | Uni-ZAP XR | LP03 |
| HSLG | | | |
| HSDA HSDD HSDE HSDF HSDG | Spinal cord | Uni-ZAP XR | LP03 |
| HSDH | | | |
| HPWS | rostate-BPH subtracted II | pBS | LP03 |
| HSKW HSKX HSKY | Smooth Muscle- HASTE normalized | pBS | LP03 |
| FPB HFPC HFPD | H. Frontal cortex,epileptic;re-excision | Uni-ZAP XR | LP03 |
| HSDI HSDJ HSDK | Spinal Cord, re-excision | Uni-ZAP XR | LP03 |
| HSKN HSKO | Smooth Muscle Serum Treated, Norm | pBS | LP03 |
| HSKG HSKH HSKI | Smooth muscle, serum induced,re-exc | pBS | LP03 |
| HFCA HFCB HFCC HFCD HFCE | Human Fetal Brain | Uni-ZAP XR | LP04 |
| HFCF | | | |
| HPTA HPTB HPTD | Human Pituitary | Uni-ZAP XR | LP04 |
| HTHB HTHC HTHD | Human Thymus | Uni-ZAP XR | LP04 |
| HE6B HE6C HE6D HE6E HE6F HE6G | Human Whole Six Week Old Embryo | Uni-ZAP XR | LP04 |
| HE6S | | | |
| HSSA HSSB HSSC HSSD HSSE HSSF | Human Synovial Sarcoma | Uni-ZAP XR | LP04 |
| HSSG HSSH HSSI HSSJ HSSK | | | |
| HE7T | Week Old Early Stage Human, | Uni-ZAP XR | LP04 |
| | subtracted | | |
| HEPA HEPB HEPC | Human Epididymus | Uni-ZAP XR | LP04 |
| HSNA HSNB HSNC HSNM HSNN | Human Synovium | Uni-ZAP XR | LP04 |
| HPFB HPFC HPFD HPFE | Human Prostate Cancer, Stage C fraction | Uni-ZAP XR | LP04 |
| HE2A HE2D HE2E HE2H HE2I HE2M | 12 Week Old Early Stage Human | Uni-ZAP XR | LP04 |
| HE2N HE2O | | | |
| HE2B HE2C HE2F HE2G HE2P HE2Q | 12 Week Old Early Stage Human, II | Uni-ZAP XR | LP04 |
| HPTS HP7IT HPTU | Human Pituitary, subtracted | Uni-ZAP XR | LP04 |
| HAUA HAUB HAUC | Amniotic Cells - TNF induced | Uni-ZAP XR | LP04 |
| HAQA HAQB HAQC HAQD | Amniotic Cells - Primary Culture | Uni-ZAP XR | LP04 |
| HWTA HWTB HWTC | wilm's tumor | Uni-ZAP XR | LP04 |
| HBSD | Bone Cancer, re-excision | Uni-ZAP XR | LP04 |
| HSOB | Salivary gland, re-excision | Uni-ZAP XR | LP04 |
| HSJA HSJB HSJC | Smooth muscle-lLb induced | Uni-ZAP XR | LP04 |
| HSXA HSXB HSXC HSXD | Human Substantia Nigra | Uni-ZAP XR | LP04 |
| HSHA HSHB HSHC | Smooth muscle, IL1b induced | Uni-ZAP XR | LP04 |
| HOUA HOUB HOUC HOUD HOUE | Adipocytes | Uni-ZAP XR | LP04 |
| HPWA HPWB HPWC HPWD HPWE | Prostate BPH | Uni-ZAP XR | LP04 |
| HELA HELB HELC HELD HELE | ndothelial cells-control | Uni-ZAP XR | LP04 |
| HELF HELG HELH | | | |
| HEMA HEMB HEMC HEMD HEME | Endothelial-induced | Uni-ZAP XR | LP04 |
| HEMF HEMO HEMH | | | |
| HBIA HBIB HBIC | Human Brain, Striatum | Uni-ZAP XR | LP04 |
| HHSA HHSB HHSC HHSD HHSE | Human Hypothalmus,Schizophrenia | Uni-ZAP XR | LP04 |
| HNGA HNGB HNGC HNGD HNGE | eutrophils control | Uni-ZAP XR | LP04 |
| HNGF HNGG HNGH HNGI HNGJ | | | |
| HNHA HNHB HNHC HNHD HNHE | eutrophils IL-1 and LPS induced | Uni-ZAP XR | LP04 |
| HNHF HNHG HNHH HNHI HNHJ | | | |
| HSDB HSDC | STRIATUM DEPRESSION | Uni-ZAP XR | LP04 |
| HHPT | Hypothalamus | Uni-ZAP XR | LP04 |
| HSAT HSAU HSAV HSAW HSAX | Anergic T-cell | Uni-ZAP XR | LP04 |
| HSAY HSAZ | | | |
| HBMS HBMT HBMU HBMV HBMW | Bone marrow | Uni-ZAP XR | LP04 |
| HBMX | | | |
| HOEA HOEB HOEC HOED ROBE | Osteoblasts | Uni-ZAP XR | LP04 |
| HGEF HOEJ | | | |
| HAIA HAIB HAIC HAID HAIE HAIF | Epithelial-TNFa and INF induced | Uni-ZAP XR | LP04 |
| HTGA HTGB HTGC HTGD | Apoptotic T-cell | Uni-ZAP XR | LP04 |
| HMCA HMCB HMCC HMCD HMCE | Macrophage-oxLDL | Uni-ZAP XR | LP04 |
| HMAA HMAB HMAC HMAD HMAE | Macrophage (GM-CSF treated) | Uni-ZAP XR | LP04 |
| HMAF HMAG | | | |
| HPHA | Normal Prostate | Uni-ZAP XR | LP04 |
| HPIA HPIB HPIC | LNCAP prostate cell line | Uni-ZAP XR | LP04 |
| HPJA HPJB HPJC | PC3 Prostate cell line | Uni-ZAP XR | LP04 |
| HOSE HOSF HOSO | Human Osteoclastoma, re-excision | Uni-ZAP XR | LP04 |
| HTGE HTGF | poptotic T-cell, re-excision | Uni-ZAP XR | LP04 |
| HMAJ HMAK | Macrophage (GM-CSF treated), re- | Uni-ZAP XR | LP04 |
| | excision | | |
| HACB HACC HACD | Human Adipose Tissue, re-excision | Uni-ZAP XR | LP04 |
| HFPA | H. Frontal Cortex, Epileptic | Uni-ZAP XR | LP04 |
| HFAA HFAB HFAC HFAD HFAE | Alzheimers, spongy change | Uni-ZAP XR | LP04 |
| HFAM | Frontal Lobe, Dementia | Uni-ZAP XR | LP04 |
| HMIA HMIB HMIC | Human Manic Depression Tissue | Uni-ZAP XR | LP04 |
| HTSA HTSE HTSF HTSG HTSH | Human Thymus | pBS | LP05 |
| HPBA HPBB HPBC HPBD HPBE | Human Pineal Gland | pBS | LP05 |
| HSAA HSAB HSAC | SA 172 Cells | pBS | LP05 |
| HSBA HSBB HSBC HSBM | SC 172 cells | pBS | LP05 |
| HJAA HIAB HJAC HJAD | Jurkat T-cell GI phase | pBS | LP05 |
| HJBA HJBB HJBC HJBD | Jurkat T-Cell, S phase | pBS | LP05 |
| HAFA HAFB | Aorta endothelial cells + TNF-a | pBS | LP05 |
| HAWA HAWB HAWC | Human White Adipose | pBS | LP05 |
| HTNA HTNB | Human Thyroid | pBS | LP05 |
| HONA | Normal Ovary, Premenopausal | pBS | LP05 |
| HARA HARB | Human Adult Retina | pBS | LP05 |
| HLJA HLJB | Human Lung | pCMVSport 1 | P06 |
| HOFM HOFN HOFO | H. Ovarian Tumor, II, OV5232 | pCMVSport 2.0 | LP07 |
| HOGA HOGB HOGC | OV 10-3-95 | CMVSport 2.0 | LP07 |
| HCGL | CD34 + cells, II | pCMVSport 2.0 | LP07 |
| HDLA | Hodgkin's Lymphoma | pCMVSport 2.0 | LP07 |
| HDTA HDTB HDTC HDTD HDTE | Hodgkin's Lymphoma II | pCMVSport 2.0 | LP07 |
| HKAA HKAB HKAC HKAD HKAE | Keratinocyte | pCMVSport2.0 | LP07 |
| HKAF HKAG HKAH | | | |
| HCIM | CAPFINDER, Crohn's Disease, lib 2 | pCMVSport2.0 | LP07 |
| HKAL | Keratinocyte, lib 2 | pCMVSport2.0 | LP07 |
| HKAT | Keratinocyte, lib 3 | pCMVSport2.0 | LP07 |
| HNDA | Nasal polyps | pCMVSport2.0 | LP07 |
| HDRA | H. Primary Dendritic Cells,lib 3 | pCMVSport2.0 | LP07 |
| HOHA HOHB HOHC | Human Osteoblasts II | pCMVSport2.0 | LP07 |
| HLDA HLDB HLDC | Liver, Hepatoma | pCMVSport3.0 | LP08 |
| HLDN HLDO HLDP | Human Liver, normal | pCMVSport3.0 | LP08 |
| HMTA | pBMC stimulated w/ poly I/C | pCMVSport3.0 | LP08 |
| HNTA | TERA2, control | pCMVSport3.0 | LP08 |
| HDPA HDPB HDPC HDPD HDPF | Primary Dendritic Cells, lib 1 | pCMVSport3.0 | LP08 |
| HDPG HDPH HDPI HDPJ HDPK | | | |
| HDPM HDPN HDPO HDPP | Primarv Dendritic cells,frac 2 | pCMVSport3.0 | LP08 |
| HMUA HMUB HMUC | Myoloid Progenitor Cell Line | pCMVSport3.0 | LP08 |
| HHEA HHEB HHEC HHED | T Cell helper I | pCMVSport3.0 | LP08 |
| HHEM HHEN HHEO HHEP | T cell helper II | pCMVSport3.0 | LP08 |
| HEQA HEQB HEQC | Human endometrial stromal cells | pCMVSport3.0 | LP08 |
| HJMA HJMB | Human endometrial stromal cells-treated | pCMVSport3.0 | LP08 |
| | with progesterone | | |
| HSWA HSWB HSWC | Human endometrial stromal cells-treated | pCMVSport3.0 | LP08 |
| | with estradiol | | |
| HSYA HSYB HSYC | Human Thymus Stromal Cells | pCMV Sport3.0 | LP08 |
| HLWA HLWB HLWC | Human Placenta | pCMVSport3.0 | LP08 |
| HRAA HRAB HRAC | Rejected Kidney, lib 4 | pCMVSport3.0 | LP08 |
| HMTM | PCR, pBMC I/C treated | PCRII | LP09 |
| HMIA | H. Menringima, M6 | pSport 1 | LP10 |
| HMKA HMKB HMKC HMKD HMKE | H. Meningima, M1 | pSport 1 | LP10 |
| HUSO HUSI | Human umbilical vein endothelial cells, | pSport 1 | LP10 |
| | IL-4 induced | | |
| HUSX HUSY | Human Umbilical Vein Endothelial | pSport 1 | LP10 |
| | Cells, uninduced | | |
| HOFA | Ovarian Tumor I, OV5232 | pSport 1 | LP10 |
| HCFA HCFB HCFC HCFD | T-Cell PHA 16 hrs | pSport 1 | LP10 |
| HCFL HCFM HCFN HCFO | T-Cell PHA 24 hrs | Sport 1 | LP10 |
| HADA HADC HADD HADE HADF | Human Adipose | pSport 1 | LP10 |
| HADG | | | |
| HOVA HOVB HOVC | Human Ovary | pSport 1 | LP10 |
| HTWB HTWC HTWD HTWE HTWF | Resting T-Cell Library,II | pSport 1 | LP10 |
| HMMA | Spleen metastic melanoma | pSport 1 | LP10 |
| HLYA HLYB HLYC HLYD HLYE | Spleen, Chronic lymphocytic leukemia | pSport 1 | LP10 |
| HCGA | CD34 + cell, I | pSport 1 | LP10 |
| HEOM HEON | Human Eosinophils | pSport 1 | LP10 |
| HTDA | Human Tonsil, Lib 3 | pSport 1 | LP10 |
| HSPA | Salivary Gland, Lib 2 | pSport 1 | LP10 |
| HCHA HCHB HCHC | Breast Cancer cell line, MDA 36 | pSport 1 | LP10 |
| HCHM HCHN | Breast Cancer Cell line, angiogenic | pSport 1 | LP10 |
| HCIA | Crohn's Disease | pSport 1 | LP10 |
| HDAA HDAB HDAC | HEL cell line | pSport 1 | LP10 |
| HABA | Human Astrocyte | pSport 1 | LP10 |
| HUFA HUFB HUFC | Ulcerative Colitis | pSport 1 | LP10 |
| HNTM | NTERA2 + retinoic acid, 14 days | pSport 1 | LP10 |
| HDQA | Primary Dendritic cells,CapFinder2, frac | pSport 1 | LP10 |
| | 1 | | |
| HDQM | Primary Dendritic Cells, CapFinder, frac | pSport 1 | LP10 |
| | 2 | | |
| HLDX | Human Liver, normal,CapFinder | pSport 1 | LP10 |
| HULA HULB HULC | Human Dermal Endothelial | pSport 1 | LP10 |
| | Cells,untreated | | |
| HUMA | Human Dermal Endothelial cells,treated | pSport1 | LP10 |
| HCIA | Human Stromal Endometrial fibroblasts, | pSport1 | LP10 |
| | untreated | | |
| HCJM | Human Stromal endometrial fibroblasts, | pSport1 | LP10 |
| | treated w/estradiol | | |
| HEDA | Human Stromal endometrial fibroblasts, | pSport1 | LP10 |
| | treated with progesterone | | |
| HFNA | Human ovary tumor cell OV350721 | pSport1 | LP10 |
| HKGA HKGB HKGC HKGD | Merkel Cells | pSport1 | LP10 |
| HISA HISB HISC | Pancreas Islet Cell Tumor | pSport1 | LP10 |
| HLSA | Skin, burned | pSport1 | LP10 |
| HBZA | Prostate,BPH, Lib 2 | pSport 1 | LP10 |
| HBZS | Prostate BPH,Lib 2, subtracted | pSport 1 | LP10 |
| HFIA HFIB HFIC | Synovial Fibroblasts (control) | pSport 1 | LP10 |
| HFIH HFII HFIJ | Synovial hypoxia | pSport 1 | LP10 |
| HFIT HFIU HFIV | Synovial IL-1/TNF stimulated | pSport 1 | LP10 |
| HGCA | Messangial cell, frac 1 | pSport1 | LP10 |
| HMVA HMVB HMVC | Bone Marrow Stromal Cell, untreated | pSport1 | LP10 |
| HFIX HEIY HFIZ | Synovial Fibroblasts (Il1/TNF), subt | pSport1 | LP10 |
| HFOX HFOY HFOZ | Synovial hypoxia-RSF subtracted | pSport1 | LP10 |
| HMQA HMQB HMQC HMQD | Human Activated Monocytes | Uni-ZAP XR | LP11 |
| HLIA HLIB HLIC | Human Liver | pCMVSport 1 | LP012 |
| HHBA HHBB HHBC HHBD HHBE | Human Heart | pCMVSport 1 | LP012 |
| HBBA HBBB | Human Brain | pCMVSport 1 | LP012 |
| HLJA HLJB HLJC HLJD HLJE | Human Lung | pCMVSport 1 | LP012 |
| HOGA HOGB HOGC | Ovarian Tumor | pCMVSport 2.0 | LP012 |
| HTIM | Human Tonsils, Lib 2 | pCMVSport 2.0 | LP012 |
| HAMF HAMG | KMH2 | pCMVSport 3.0 | LP012 |
| HAJA HAJB HAJC | L428 | pCMVSport 3.0 | LP012 |
| HWBA HWBB HWBC HWBD HWBE | Dendritic cells, pooled | pCMVSport 3.0 | LP012 |
| HWAA HWAB HWAC HWAD HWAE | Human Bone Marrow, treated | pCMVSport 3.0 | LP012 |
| HYAA HYAB HYAC | B Cell lymphoma | pCMVSport 3.0 | LP012 |
| HWHG HWHH HWHI | Healing groin wound, 6.5 hours post | pCMVSport 3.0 | LP012 |
| | incision | | |
| HWHP HWHQ HWHR | Healing groin wound; 7.5 hours post | pCMVSport 3.0 | LP012 |
| | incision | | |
| HARM | Healing groin wound - zero hr post- | pCMVSport 3.0 | LP012 |
| | incision (control) | | |
| HBIM | Olfactory epithelium; nasalcavity | pCMVSport 3.0 | LP012 |
| HWDA | Healing Abdomen wound; 70&90 min | pCMVSport 3.0 | LP012 |
| | post incision | | |
| HWEA | Healing Abdomen Wound;15 days post | pCMVSport 3.0 | LP012 |
| | incision | | |
| HWJA | H ealing Abdomen Wound;21&29 days | pCMVSport 3.0 | LP012 |
| HNAL | Human Tongue, frac 2 | pSport1 | LP012 |
| HMJA | H. Meniingima, M6 | pSport1 | LP012 |
| HMKA HMKB HMKC HMKD HMKE | H. Meningima, M1 | pSport1 | LP012 |
| HOFA | Ovarian Tumor I, OV5232 | pSport 1 | LP012 |
| HCFA HCFB HCFC HCFD | T-Cell PHA 16 hrs | pSport1 | LP012 |
| HCEL HCFM HCFN HCFO | T-Cell PHA 24 hrs | pSport1 | LP012 |
| HMMA HMMB HMMC | Spleen metastic melanoma | pSport 1 | LP012 |
| HTDA | Human Tonsil, Lib 3 | pSport1 | LP012 |
| HDBA | Human Fetal Thymus | pSport1 | LP012 |
| HDUA | Pericardium | pSport1 | LP012 |
| HBZA | Prostate,BPH, Lib 2 | pSport1 | LP012 |
| HWCA | Larynx tumor | pSport1 | LP012 |
| HWKA | Normal lung | pSport1 | LP012 |
| HSMB | Bone marrow stroma,treated | pSport1 | LP012 |
| HBHM | Normal trachea | pSport 1 | LP012 |
| HLFC | Human Larynx | pSport 1 | LP012 |
| HLRB | Siebben Polyposis | pSport1 | LP012 |
| HNIA | Mammary Gland | pSport1 | LP012 |
| HNJB | Palate carcinoma | pSport1 | LP012 |
| HNKA | Palate normal | pSport1 | LP012 |
| HMZA | Pharynx carcinoma | pSport1 | LP012 |
| HABG | Cheek Carcinoma | pSport 1 | LP012 |
| HMZM | Pharynx Carcinoma | pSport1 | LP012 |
| HDRM | Larynx Carcinoma | pSport1 | LP012 |
| HVAA | Pancreas normal PCA4 No | pSport1 | LP012 |
| HICA | tongue carcinoma | pSport1 | LP012 |
| HUKA HUKB HUKC HUKD HUKE | Human Uterine Cancer | Lambda ZAP II | LP013 |
| HFFA | Human Fetal Brain, random primed | Lambda ZAP II | LP013 |
| HTUA | Activated T-cell labeled with 4-thioluri | Lambda ZAP II | LP013 |
| HBQA | Earky Stage Human Brain, random | Lambda ZAP II | LP013 |
| HMEB | | primed | |
| HMEB | Human microvascular Endothelial cells, | Lambda ZAP II | LP013 |
| | fract. B | | |
| HUSH | Human Umbilical Vein Endothelial | Lambda ZAP II | LP013 |
| | cells, fract. A. re-excision | | |
| HLQC HLQD | epatocellular tumor, re-excision | Lambda ZAP II | LP013 |
| HTWJ HTWK HTWL | Resting T-cell, re-excision | Lambda ZAP II | LP013 |
| HF65 | Human Whole 6 week Old Embryo (11), | pBluescript | LP013 |
| | subt | | |
| HUPS | Human Hippocampus, subtracted | pBluescript | LP013 |
| HLIS | NCAP, differential expression | pBluescript | LP013 |
| HLHS HLHT | Early Stage Human Lung, Subtracted | pBluescript | LP013 |
| HSUS | Supt cells, cyclohexamide treated, | pBluescript | LP013 |
| | subtracted | | |
| HSUT | Supt cells. cyclohexamide treated, | pBluescript | LP013 |
| | differentially expressed | | |
| HSDS | H. Striatum Depression, subtracted | pBluescnpt | LP013 |
| HPTZ | Human Pituitary, Subtracted VII | pBluescript | LP013 |
| HSDX | H. Striatum Depression, subt II | pBluescript | LP013 |
| HSDZ | H. Striatum Depression, subt | pBluescript | LP013 |
| HPBA HPBB HPBC HPBD HPBE | Human Pineal Gland | pBluescript SK- | LP013 |
| HRTA | Colorectal Tumor | pBluescript SK- | LP013 |
| HSBA HSBB HSBC HSBM | HSC172 cells | pBluescript SK- | LP013 |
| HJAA HIAB HJAC HJAD | Jurkat T-cell G1 phase | pBluescript SK- | LP013 |
| HJBA HJBB HJBC HJBD | Jurkat T-cell, S1 phase | pBluescript SK- | LP013 |
| HTNA HTNB | Human Thyroid | pBluescript SK- | LP013 |
| HAHA HAHB | Human Adult Heart | Uni-ZAP XR | LP013 |
| HE6A | Whole 6 week Old Embryo | Uni-ZAP XR | LP013 |
| HFCA HFCB HFCC HFCD HFCE | Human Fetal Brain | Uni-ZAP XR | LP013 |
| HFKC HFKD HFKE HFKF HFKG | Human Fetal Kidney | Uni-ZAP XR | LP013 |
| HGBA HGBD HGBE HGBF HGBG | Human Gall Bladder | Uni-ZAP XR | LP013 |
| HPRA HPRB HPRC HPRD | Human Prostate | Uni-ZAP XR | LP013 |
| HTEA HTEB HTEC HTED HTEE | Human Testes | Uni-ZAP XR | LP013 |
| HTTA HTTB HTTC HTTD HTTE | Human Testes Tumor | Uni-ZAP XR | LP013 |
| HYBA HYBB | Human Fetal Bone | Uni-ZAP XR | LP013 |
| HFLA | Human Fetal Liver | Uni-ZAP XR | LP013 |
| HHFB HHFC HHFD HHFE HHFF | Human Fetal Heart | Uni-ZAP XR | LP013 |
| HUVB HUVC HUVD HUVE | Human Umbilical Vein, End. remake | Uni-ZAP XR | LP013 |
| HTHB HTHC HTHD | Human Thymus | Uni-ZAP XR | LP013 |
| HSTA HSTB HSTC HSTD | Human Skin Tumor | Uni-ZAP XR | LP013 |
| HTAA HTAB HTAC HTAD HTAE | Human Activated T-cells | Uni-ZAP XR | LP013 |
| HFEA HFEB HFEC | Human Fetal Epithelium (skin) | Uni-ZAP XR | LP013 |
| HJPA HJPB HJPC HJPD | Human Jurkat Membrane Bound | Uni-ZAP XR | LP013 |
| | Polysomes | | |
| HESA | Human Epithelioid Sarcoma | Uni-ZAP XR | LP013 |
| HHALS | Human Adult Liver, Subtracted | Uni-ZAP XR | LP013 |
| HFTA HFTB HFTC HFTD | Human Fetal Dura Mater | Uni-ZAP XR | LP013 |
| HCAA HCAB HCAC | Cem cells, cyclohexamide treated | Uni-ZAP XR | LP013 |
| HRGA HRGB HRGC HRGD | Raji Cells, cyclohexamide treated | Uni-ZAP XR | LP013 |
| HE9A HE9B HE9C HE9D HE9E | Nine Week Old Early Stage Human | Uni-ZAP XR | LP013 |
| HSFA | Human Fibrosarcoma | Uni-ZAP XR | LP013 |
| HATA HATB HATC HATD HATE | Human Adrenal Gland Tumor | Uni-ZAP XR | LP013 |
| HTRA | Human Trachea Tumor | Uni-ZAP XR | LP013 |
| HE2A HE2D HE2E HE2H HE2I | 12 Week Old Early Stage Human | Uni-ZAP XR | LP013 |
| HE2B HE2C HE2F HE2G HE2P | 12 Week Old Early Stage Human, II | Uni-ZAP XR | LP013 |
| HNEA HNEB HNEC HNED HNEE | Human Neutrophil | Uni-ZAP XR | LP013 |
| HBGA | Human Primary Breast Cancer | Uni-ZAP XR | LP013 |
| HPTS HPTT HPTU | Human Pituitary, subtracted | Uni-ZAP XR | LP013 |
| HMQA HMQB HMQC HMQD | Human Activated Monocytes | Uni-ZAP XR | LP013 |
| HOAA HOAB HOAC | Human Osteosarcoma | Uni-ZAP XR | LP013 |
| HTOA HTOD HTOE HTOF HTOG | Human tonsils | Uni-ZAP XR | LP013 |
| HMGB | Human OB MG63 control fraction I | Uni-ZAP XR | LP013 |
| HOPB | Human OB HOS control fraction I | Uni-ZAP XR | LP013 |
| HOQB | Human OR HOS treated (1 nM E2) | Uni-ZAP XR | LP013 |
| | fraction I | | |
| HAUA HAUB HAUC | Amniotic Cells - TNF induced | Uni-ZAP XR | LP013 |
| HAQA HAQB HAQC HAQD | Amniotic Cells - Primary Culture | Uni-ZAP XR | LP013 |
| HROA HROC | UMAN STOMACH | Uni-ZAP XR | LP013 |
| HBJA HBJB HBJC HBJD HBJE | HUMAN B CELL LYMPHOMA | Uni-ZAP XR | LP013 |
| HODA HODB HODC HODD | Human ovarian cancer | Uni-ZAP XR | LP013 |
| HCPA | Corpus Callosum | Uni-ZAP XR | LP013 |
| HSOA | stomach cancer (human) | Uni-ZAP XR | LP013 |
| HERA | SKIN | Uni-ZAP XR | LP013 |
| HMDA | Brain-medulloblastoma | Uni-ZAP XR | LP013 |
| HGLA HGLB HGLD | Glioblastoma | Uni-ZAP XR | LP013 |
| HTA HWTB HWTC | wilim's tumor | Uni-ZAP XR | LP013 |
| HEAA | H. Atrophic Endometrium | Uni-ZAP XR | LP013 |
| HAPN HAPO HAPP HAPQ HAPR | Human Adult Pulmonary;re-excision | Uni-ZAP XR | LP013 |
| HLTG HLTh | Human T-cell lymphoma;re-excision | Uni-ZAP XR | LP013 |
| HAHC HAHD HAHE | Human Adult Heart;re-excision | Uni-ZAP XR | LP013 |
| HAGA HAGB HAGC HAGD HAGE | Human Amygdala | Uni-ZAP XR | LP013 |
| HSIA HSJB HSJC | Smooth muscle-lLb induced | Uni-ZAP XR | LP013 |
| HSHA HSHB HSHC | Smooth muscle, IL1b induced | Uni-ZAP XR | LP013 |
| HPWA HPWB HPWC HPWD HPWE | Prostate BPH | Uni-ZAP XR | LP013 |
| HPIA HPIB HPIC | NCAP prostate cell line | Uni-ZAP XR | LP013 |
| HPIA HPJB HPJC | PC3 Prostate cell line | Uni-ZAP XR | LP013 |
| HBTA | Bone Marrow Stoma, TNF&LPS ind | Uni-ZAP XR | LP013 |
| HMCF HMCG HMCH HMCI HMCJ | Macrophage-oxLDL; re-excision | Uni-ZAP XR | LP013 |
| HAGG HAGH HAGI | Human Amygdala;re-excision | Uni-ZAP XR | LP013 |
| HACA | H. Adipose Tissue | Uni-ZAP XR | LP013 |
| HKFB | K562 + PMA (36 hrs),re-excision | ZAP Express | LP013 |
| HCWT HCWU HCWV | CD34 positive cells (cord blood),re-ex | ZAP Express | LP013 |
| HBWA | Whole brain | ZAP Express | LP013 |
| HBXA HBXB HBXC HBXD | Human Whole Brain #2- Oligo dT > | ZAP Express | LP013 |
| | 1.5Kb | | |
| HAVM | Temporal cortex-Alzheizmer | pT-Adv | LP014 |
| HAVT | Hippocampus, Alzheimer Subtracted | pT-Adv | LP014 |
| HHAS | CHME Cell Line | Uni-ZAP XR | LP014 |
| HAJR | Larynx normal | pSport 1 | LP014 |
| HWLE HWLF HWLG HWLH | Colon Normal | pSport 1 | LP014 |
| HCRM HCRN HCRO | Colon Carcinoma | pSport 1 | LP014 |
| HWLI HWLJ HWLK | Colon Normal | pSport 1 | LP014 |
| HWLQ HWLR HWLS HWLT | Colon Tumor | pSport 1 | LP014 |
| HBFM | Gastrocnemius Muscle | pSport 1 | LP014 |
| HBOD HBOE | Quadriceps Muscle | pSport 1 | LP014 |
| HBKD HBKE | Soleus Muscle | pSport 1 | LP014 |
| HCCM | Pancreatic Langerhans | pSport 1 | LP014 |
| HWGA | Larynx carcinoma | pSport 1 | LP014 |
| HWGM HWGN | Larynx carcinoma | pSport 1 | LP014 |
| HWLA HWLB HWLC | Normal colon | pSport 1 | LP014 |
| HWLM HWLN | Colon Tumor | pSport 1 | LP014 |
| HVAM HVAN HVAO | Pancreas Tumor | pSport 1 | LP014 |
| HWGQ | Larynx carcinoma | pSport 1 | LP014 |
| HAQM HAQN | Salivary Gland | pSport 1 | LP014 |
| HASM | Stomach; normal | pSport 1 | LP014 |
| HBCM | terus; normal | pSport 1 | LP014 |
| HCDM | Testis; normal | pSport 1 | LP014 |
| HDJM | Brain; normal | pSport 1 | LP014 |
| HEFM | Adrenal Gland,normal | pSport 1 | LP014 |
| HBAA | Rectum normal | pSport 1 | LP014 |
| HFDM | Rectum tumour | pSport 1 | LP014 |
| HGAM | Colon, normal | pSport 1 | LP014 |
| HHMM | Colon, tumour | pSport 1 | LP014 |
| HCLB HCLC | Human Lung Cancer | Lambda Zap II | LP015 |
| HRLA | L1 Cell line | zAP Express | LP015 |
| HHAM | Hypothalamus. Alzheimer's | pCMVSport 3.0 | LP015 |
| HKBA | Ku 812F Basophils Line | pSport 1 | LP015 |
| HS2S | Saos2, Dexamethosome Treated | pSport 1 | LP016 |
| HA5A | Lung Carcinoma A549 TNFalpha | pSport 1 | LP016 |
| | activated | | |
| HTFM | TF-1 Cell Line GM-CSF Treated | Sport 1 | LP016 |
| HYAS | Thyroid Tumour | pSport 1 | LP016 |
| HUTS | Larynx Normal | pSport 1 | LP016 |
| HXOA | Larynx Tumor | pSport 1 | LP016 |
| HEAH | Ea.hy.926 cell line | pSport 1 | LP016 |
| HINA | Adenocarcinoma Human | pSport 1 | LP016 |
| HRMA | Lung Mesothelium | pSport 1 | LP016 |
| HLCL | Human Pre-Differentiated Adipocytes | Uni-Zap XR | LP017 |
| HS2A | Saos2 Cells | pSport 1 | LP020 |
| HS2I | Saos2 Cells; Vitamin D3 Treated | pSport 1 | LP020 |
| HUCM | CHME Cell Line, untreated | pSport 1 | LP020 |
| HEPN | Aryepiglottis Normal | pSport 1 | LP020 |
| HPSN | Sinus Piniformis Tumour | pSport 1 | LP020 |
| HNSA | Stomach Normal | pSport 1 | LP020 |
| HNSM | Stomach Tumour | pSport 1 | LP020 |
| HNLA | Liver Normal Met5No | pSport 1 | LP020 |
| HUTA | Liver Tumour Met 5 Tu | pSport 1 | LP020 |
| HOCN | Colon Normal | pSport 1 | LP020 |
| HOCT | Colon Tumor | pSport 1 | LP020 |
| HTNT | Tongue Tumour | pSport 1 | LP020 |
| HLXN | Larynx Normal | pSport 1 | LP020 |
| HLXT | Larynx Tumour | pSport 1 | LP020 |
| HTYN | Thymus | pSport 1 | LP020 |
| HPLN | Placenta | pSport 1 | LP020 |
| HTNG | Tongue Normal | pSport 1 | LP020 |
| HZAA | Thyroid Normal (SDCA2 No) | pSport 1 | LP020 |
| HWES | Thyroid Thyroiditis | pSport 1 | LP020 |
| HFHD | Ficolled Human Stromal Cells, 5Fu | Trip1Ex2 | LP021 |
| | treated | | |
| HFHM,HFHN | Ficolled Human Stromal Cells, | Trip1Ex2 | LP021 |
| | untreated | | |
| HPCI | Hep G2 Cells, lambda library | lambda Zap-CMV | LP021 |
| | | XR | |
| HBCA,HBCB,HBCC | H. Lymph node breast Cancer | Uni-ZAP XR | LP021 |
| HCOK | Chondrocytes | pSPORT1 | LP022 |
| HDCA, HDCB, HDCC | Dendritic Cells From CD34 Cells | pSPORT1 | LP022 |
| HDMA, HDMB | CD40 activated monocyte dendritic cells | pSPORT1 | LP022 |
| HDDM, HDDN, HDDO | LPS activated derived dendritic cells | pSPORT1 | LP022 |
| HPCR | Hep G2 Cells, PCR library | lambda Zap-CMV | LP022 |
| | | XR | |
| HAAA, HAAB, HAAC | Lung, Cancer (4005313A3): Invasive | pSPORT1 | LP022 |
| | Poorly Differentiated Lung | | |
| | Adenocarcinoma | | |
| HIPA, HIPB, HIPC | Lung, Cancer (4005163 B7): Invasive, | pSPORT1 | LP022 |
| | Poorly Diff. Adenocarcinoma. | | |
| | Metastatic | | |
| HOOH, HOOI | Ovary, Cancer: (4004562 B6) Papillary | pSPORT1 | LP022 |
| | Serous Cystic Neoplasm, Low | | |
| | Malignant Pot | | |
| HIDA | Lung, Normal: (4005313 B1) | pSPORT1 | LP022 |
| HUJA,HUJB,HUJC,HUJD,HUJE | B-Cells | pCMVSport 3.0 | LP022 |
| HNOA,HNOB,HNOC,HNOD | Ovary, Normal: (9805C040R) | pSPORT1 | LP022 |
| HNLM | Lung, Normal: (4005313 B1) | pSPORT1 | LP022 |
| HSCL | Stromal Cells | pSPORT1 | LP022 |
| HAAX | Lung, Cancer: (4005313 A3) Invasive | pSPORT1 | LP022 |
| | Poorly-differentiated Metastatic lung | | |
| | adenocarcinoma | | |
| HUUA,HUUB,HUUC,HUUD | B-cells (unstimulated) | pTrip1Ex2 | LP022 |
| HWWA,IIWWB,HWWC,HWWD,HW | B-cells (stimulated) | pSPORT1 | LP022 |
| WE,HWWF,HWWG | | | |
| HCCC | Colon, Cancer: (9808C064R) | pCMVSport 3.0 | LP023 |
| HPDO HPDP HPDQ HPDR HPD | Ovary, Cancer (9809C332): Poorly | pSport 1 | LP023 |
| | differentiated adenocarcinoma | | |
| HPCO HPCP HPCQ HPCT | Ovary, Cancer (15395A1F): Grade II | pSport 1 | LP023 |
| | Papillary Carcinoma | | |
| HOCM HOCO HOCP HOCQ | Ovary, Cancer: (15799A1F) Poorly | pSport 1 | LP023 |
| | differentiated carcinoma | | |
| HCBM HCBN HCBO | Breast, Cancer: (4004943 A5) | pSport 1 | LP023 |
| HNBT HNBU HNBV | Breast, Normal: (4005522B2) | pSport 1 | LP023 |
| HBCP HBCQ | Breast, Cancer: (4005522 A2) | pSport 1 | LP023 |
| HBCJ | Breast, Cancer: (9806C012R) | pSport 1 | LP023 |
| HSAM HSAN | Stromal cells 3.88 | pSport 1 | LP023 |
| HVCA HVCB HVCC HVCD | Ovary, Cancer: (4004332 A2) | pSport 1 | LP023 |
| HSCK HSEN HSEO | Stromal cells (HBM3.18) | pSport 1 | LP023 |
| HSCP HSCQ | stromal cell clone 2.5 | pSport 1 | LP023 |
| HUXA | Breast Cancer: (4005385 A2) | pSport 1 | LP023 |
| HCOM HCON HCOO HCOP HCOQ | Ovary, Cancer (4004650 A3): Well- | pSport 1 | LP023 |
| | differentiated Micropapillary Serous | | |
| | Carcinoma | | |
| HBNM | Breast, Cancer: (9802C020E) | pSport 1 | LP023 |
| HVVA HVVB HVVC HVVD HVVE | Human Bone Marrow, treated | pSport 1 | LP023 |

[0841] Two approaches can be used to isolate a particular clone from the deposited sample of plasmid DNAs cited for that clone in Table 5. First, a plasmid is directly isolated by screening the clones using a polynucleotide probe corresponding to the nucleotide sequence of SEQ ID NO:X.

[0842] Particularly, a specific polynucleotide with 30-40 nucleotides is synthesized using an Applied Biosystems DNA synthesizer according to the sequence reported. The oligonucleotide is labeled, for instance, with ³²P-γ-ATP using T4 polynucleotide kinase and purified according to routine methods. (E.g., Maniatis et al., Molecular Cloning: A Laboratory Manual, Cold Spring Harbor Press, Cold Spring, N.Y. (1982).) The plasmid mixture is transformed into a suitable host, as indicated above (such as XL-1 Blue (Stratagene)) using techniques known to those of skill in the art, such as those provided by the vector supplier or in related publications or patents cited above. The transformants are plated on 1.5% agar plates (containing the appropriate selection agent, e.g., ampicillin) to a density of about 150 transformants (colonies) per plate. These plates are screened using Nylon membranes according to routine methods for bacterial colony screening (e.g., Sambrook et al., Molecular Cloning: A Laboratory Manual, 2nd Edit., (1989), Cold Spring Harbor Laboratory Press, pages 1.93 to 1.104), or other techniques known to those of skill in the art.

[0843] Alternatively, two primers of 17-20 nucleotides derived from both ends of the nucleotide sequence of SEQ ID NO:X are synthesized and used to amplify the desired cDNA using the deposited cDNA plasmid as a template. The polymerase chain reaction is carried out under routine conditions, for instance, in 25 μl of reaction mixture with 0.5 ug of the above cDNA template. A convenient reaction mixture is 1.5-5 mM MgCl₂, 0.01% (w/v) gelatin, 20 μM each of dATP, dCTP, dGTP, dTTP, 25 pmol of each primer and 0.25 Unit of Taq polymerase. Thirty five cycles of PCR (denaturation at 94° C. for 1 min; annealing at 55° C. for 1 min; elongation at 72° C. for 1 min) are performed with a Perkin-Elmer Cetus automated thermal cycler. The amplified product is analyzed by agarose gel electrophoresis and the DNA band with expected molecular weight is excised and purified. The PCR product is verified to be the selected sequence by subcloning and sequencing the DNA product.

[0844] Several methods are available for the identification of the 5′ or 3′ non-coding portions of a gene which may not be present in the deposited clone. These methods include but are not limited to, filter probing, clone enrichment using specific probes, and protocols similar or identical to 5′ and 3′ “RACE” protocols which are well known in the art. For instance, a method similar to 5′ RACE is available for generating the missing 5′ end of a desired full-length transcript. (Fromont-Racine et al., Nucleic Acids Res. 21(7):1683-1684 (1993).)

[0845] Briefly, a specific RNA oligonucleotide is ligated to the 5′ ends of a population of RNA presumably containing full-length gene RNA transcripts. A primer set containing a primer specific to the ligated RNA oligonucleotide and a primer specific to a known sequence of the gene of interest is used to PCR amplify the 5′ portion of the desired full-length gene. This amplified product may then be sequenced and used to generate the full length gene.

[0846] This above method starts with total RNA isolated from the desired source, although poly-A+ RNA can be used. The RNA preparation can then be treated with phosphatase if necessary to eliminate 5′ phosphate groups on degraded or damaged RNA which may interfere with the later RNA ligase step. The phosphatase should then be inactivated and the RNA treated with tobacco acid pyrophosphatase in order to remove the cap structure present at the 5′ ends of messenger RNAs. This reaction leaves a 5′ phosphate group at the 5′ end of the cap cleaved RNA which can then be ligated to an RNA oligonucleotide using T4 RNA ligase.

[0847] This modified RNA preparation is used as a template for first strand cDNA synthesis using a gene specific oligonucleotide. The first strand synthesis reaction is used as a template for PCR amplification of the desired 5′ end using a primer specific to the ligated RNA oligonucleotide and a primer specific to the known sequence of the gene of interest. The resultant product is then sequenced and analyzed to confirm that the 5′ end sequence belongs to the desired gene.

### Example 2

[0848] Isolation of Genomic Clones Corresponding to a Polynucleotide

[0849] A human genomic P1 library (Genomic Systems, Inc.) is screened by PCR using primers selected for the sequence corresponding to SEQ ID NO:X, according to the method described in Example 1. (See also, Sambrook.)

### Example 3

[0850] Tissue Specific Expression Analysis

[0851] The Human Genome Sciences, Inc. (HGS) database is derived from sequencing tissue specific cDNA libraries. Libraries generated from a particular tissue are selected and the specific tissue expression pattern of EST groups or assembled contigs within these libraries is determined by comparison of the expression patterns of those groups or contigs within the entire database. ESTs which show tissue specific expression are selected.

[0852] The original clone from which the specific EST sequence was generated, is obtained from the catalogued library of clones and the insert amplified by PCR using methods known in the art. The PCR product is denatured then transferred in 96 well format to a nylon membrane (Schleicher and Scheull) generating an array filter of tissue specific clones. Housekeeping genes, maize genes, and known tissue specific genes are included on the filters. These targets can be used in signal normalization and to validate assay sensitivity. Additional targets are included to monitor probe length and specificity of hybridization.

[0853] Radioactively labeled hybridization probes are generated by first strand cDNA synthesis per the manufacturer's instructions (Life Technologies) from mRNA/RNA samples prepared from the specific tissue being analyzed. The hybridization probes are purified by gel exclusion chromatography, quantitated, and hybridized with the array filters in hybridization bottles at 65° C. overnight. The filters are washed under stringent conditions and signals are captured using a Fuji phosphorimager.

[0854] Data is extracted using AIS software and following background subtraction, signal normalization is performed. This includes a normalization of filter-wide expression levels between different experimental runs. Genes that are differentially expressed in the tissue of interest are identified and the full length sequence of these clones is generated.

### Example 4

[0855] Chromosomal Mapping of the Polynucleotides

[0856] An oligonucleotide primer set is designed according to the sequence at the 5′ end of SEQ ID NO:X. This primer preferably spans about 100 nucleotides. This primer set is then used in a polymerase chain reaction under the following set of conditions: 30 seconds, 95° C.; 1 minute, 56° C.; 1 minute, 70° C. This cycle is repeated 32 times followed by one 5 minute cycle at 70° C. Human, mouse, and hamster DNA is used as template in addition to a somatic cell hybrid panel containing individual chromosomes or chromosome fragments (Bios, Inc). The reactions is analyzed on either 8% polyacrylamide gels or 3.5 % agarose gels. Chromosome mapping is determined by the presence of an approximately 100 bp PCR fragment in the particular somatic cell hybrid.

### Example 5

[0857] Bacterial Expression of a Polypeptide

[0858] A polynucleotide encoding a polypeptide of the present invention is amplified using PCR oligonucleotide primers corresponding to the 5′ and 3′ ends of the DNA sequence, as outlined in Example 1, to synthesize insertion fragments. The primers used to amplify the cDNA insert should preferably contain restriction sites, such as BamHI and XbaI, at the 5′ end of the primers in order to clone the amplified product into the expression vector. For example, BamHI and XbaI correspond to the restriction enzyme sites on the bacterial expression vector pQE-9. (Qiagen, Inc., Chatsworth, Calif.). This plasmid vector encodes antibiotic resistance (Amp^{r}), a bacterial origin of replication (ori), an IPTG-regulatable promoter/operator (P/O), a ribosome binding site (RBS), a 6 histidine tag (6-His), and restriction enzyme cloning sites.

[0859] The pQE-9 vector is digested with BamHI and XbaI and the amplified fragment is ligated into the pQE-9 vector maintaining the reading frame initiated at the bacterial RBS. The ligation mixture is then used to transform the E. coli strain M15/rep4 (Qiagen, Inc.) which contains multiple copies of the plasmid pREP4, which expresses the lacI repressor and also confers kanamycin resistance (Kan^{r}). Transformants are identified by their ability to grow on LB plates and ampicillin/kanamycin resistant colonies are selected. Plasmid DNA is isolated and confirmed by restriction analysis.

[0860] Clones containing the desired constructs are grown overnight (O/N) in liquid culture in LB media supplemented with both Amp (100 ug/ml) and Kan (25 ug/ml). The O/N culture is used to inoculate a large culture at a ratio of 1:100 to 1:250. The cells are grown to an optical density 600 (O.D.⁶⁰⁰) of between 0.4 and 0.6. IPTG (Isopropyl-B-D-thiogalacto pyranoside) is then added to a final concentration of 1 mM. IPTG induces by inactivating the lacI repressor, clearing the P/O leading to increased gene expression.

[0861] Cells are grown for an extra 3 to 4 hours. Cells are then harvested by centrifugation (20 mins at 6000×g). The cell pellet is solubilized in the chaotropic agent 6 Molar Guanidine HCl by stirring for 3-4 hours at 4° C. The cell debris is removed by centrifugation, and the supernatant containing the polypeptide is loaded onto a nickel-nitrilo-tri-acetic acid (“Ni-NTA”) affinity resin column (available from QIAGEN, Inc., supra). Proteins with a 6×His tag bind to the Ni-NTA resin with high affinity and can be purified in a simple one-step procedure (for details see: The QIAexpressionist (1995) QIAGEN, Inc., supra).

[0862] Briefly, the supernatant is loaded onto the column in 6 M guanidine-HCl, pH 8, the column is first washed with 10 volumes of 6 M guanidine-HCl, pH 8, then washed with 10 volumes of 6 M guanidine-HCl pH 6, and finally the polypeptide is eluted with 6 M guanidine-HCl, pH 5.

[0863] The purified protein is then renatured by dialyzing it against phosphate-buffered saline (PBS) or 50 mM Na-acetate, pH 6 buffer plus 200 mM NaCl. Alternatively, the protein can be successfully refolded while immobilized on the Ni-NTA column. The recommended conditions are as follows: renature using a linear 6M-1M urea gradient in 500 mM NaCl, 20% glycerol, 20 mM Tris/HCl pH 7.4, containing protease inhibitors. The renaturation should be performed over a period of 1.5 hours or more. After renaturation the proteins are eluted by the addition of 250 mM immidazole. Immidazole is removed by a final dialyzing step against PBS or 50 mM sodium acetate pH 6 buffer plus 200 mM NaCl. The purified protein is stored at 4° C. or frozen at −80° C.

[0864] In addition to the above expression vector, the present invention further includes an expression vector comprising phage operator and promoter elements operatively linked to a polynucleotide of the present invention, called pHE4a. (ATCC Accession Number 209645, deposited on Feb. 25, 1998.) This vector contains: 1) a neomycinphosphotransferase gene as a selection marker, 2) an E. coli origin of replication, 3) a T5 phage promoter sequence, 4) two lac operator sequences, 5) a Shine-Delgarno sequence, and 6) the lactose operon repressor gene (lacIq). The origin of replication (oriC) is derived from pUC19 (LTI, Gaithersburg, Md.). The promoter sequence and operator sequences are made synthetically.

[0865] DNA can be inserted into the pHEa by restricting the vector with NdeI and XbaI, BamHI, XhoI, or Asp718, running the restricted product on a gel, and isolating the larger fragment (the stuffer fragment should be about 310 base pairs). The DNA insert is generated according to the PCR protocol described in Example 1, using PCR primers having restriction sites for NdeI (5′ primer) and XbaI, BamHI, XhoI, or Asp718 (3′ primer). The PCR insert is gel purified and restricted with compatible enzymes. The insert and vector are ligated according to standard protocols.

[0866] The engineered vector could easily be substituted in the above protocol to express protein in a bacterial system.

### Example 6

[0867] Purification of a Polypeptide from an Inclusion Body

[0868] The following alternative method can be used to purify a polypeptide expressed in E coli when it is present in the form of inclusion bodies. Unless otherwise specified, all of the following steps are conducted at 4-10° C.

[0869] Upon completion of the production phase of the E. coli fermentation, the cell culture is cooled to 4-10° C. and the cells harvested by continuous centrifugation at 15,000 rpm (Heraeus Sepatech). On the basis of the expected yield of protein per unit weight of cell paste and the amount of purified protein required, an appropriate amount of cell paste, by weight, is suspended in a buffer solution containing 100 mM Tris, 50 mM EDTA, pH 7.4. The cells are dispersed to a homogeneous suspension using a high shear mixer.

[0870] The cells are then lysed by passing the solution through a microfluidizer (Microfuidics, Corp. or APV Gaulin, Inc.) twice at 4000-6000 psi. The homogenate is then mixed with NaCl solution to a final concentration of 0.5 M NaCl, followed by centrifugation at 7000×g for 15 min. The resultant pellet is washed again using 0.5M NaCl, 100 mM Tris, 50 mM EDTA, pH 7.4.

[0871] The resulting washed inclusion bodies are solubilized with 1.5 M guanidine hydrochloride (GuHCl) for 2-4 hours. After 7000×g centrifugation for 15 min., the pellet is discarded and the polypeptide containing supernatant is incubated at 4° C. overnight to allow further GuHCl extraction.

[0872] Following high speed centrifugation (30,000×g) to remove insoluble particles, the GuHCl solubilized protein is refolded by quickly mixing the GuHCl extract with 20 volumes of buffer containing 50 mM sodium, pH 4.5, 150 mM NaCl, 2 mM EDTA by vigorous stirring. The refolded diluted protein solution is kept at 4° C. without mixing for 12 hours prior to further purification steps.

[0873] To clarify the refolded polypeptide solution, a previously prepared tangential filtration unit equipped with 0.16 μm membrane filter with appropriate surface area (e.g., Filtron), equilibrated with 40 mM sodium acetate, pH 6.0 is employed. The filtered sample is loaded onto a cation exchange resin (e.g., Poros HS-50, Perseptive Biosystems). The column is washed with 40 mM sodium acetate, pH 6.0 and eluted with 250 mM, 500 mM, 1000 mM, and 1500 mM NaCl in the same buffer, in a stepwise manner. The absorbance at 280 nm of the effluent is continuously monitored. Fractions are collected and further analyzed by SDS-PAGE.

[0874] Fractions containing the polypeptide are then pooled and mixed with 4 volumes of water. The diluted sample is then loaded onto a previously prepared set of tandem columns of strong anion (Poros HQ-50, Perseptive Biosystems) and weak anion (Poros CM-20, Perseptive Biosystems) exchange resins. The columns are equilibrated with 40 mM sodium acetate, pH 6.0. Both columns are washed with 40 mM sodium acetate, pH 6.0, 200 mM NaCl. The CM-20 column is then eluted using a 10 column volume linear gradient ranging from 0.2 M NaCl, 50 mM sodium acetate, pH 6.0 to 1.0 M NaCl, 50 mM sodium acetate, pH 6.5. Fractions are collected under constant A₂₈₀ monitoring of the effluent. Fractions containing the polypeptide (determined, for instance, by 16% SDS-PAGE) are then pooled.

[0875] The resultant polypeptide should exhibit greater than 95% purity after the above refolding and purification steps. No major contaminant bands should be observed from Commassie blue stained 16% SDS-PAGE gel when 5 μg of purified protein is loaded. The purified protein can also be tested for endotoxin/LPS contamination, and typically the LPS content is less than 0.1 ng/ml according to LAL assays.

### Example 7

[0876] Cloning and Expression of a Polypeptide in a Baculovirus Expression System

[0877] In this example, the plasmid shuttle vector pA2 is used to insert a polynucleotide into a baculovirus to express a polypeptide. This expression vector contains the strong polyhedrin promoter of the Autographa californica nuclear polyhedrosis virus (AcMNPV) followed by convenient restriction sites such as BamHI, XbaI and Asp718. The polyadenylation site of the simian virus 40 (“SV40”) is used for efficient polyadenylation. For easy selection of recombinant virus, the plasmid contains the beta-galactosidase gene from E. coli under control of a weak Drosophila promoter in the same orientation, followed by the polyadenylation signal of the polyhedrin gene. The inserted genes are flanked on both sides by viral sequences for cell-mediated homologous recombination with wild-type viral DNA to generate a viable virus that express the cloned polynucleotide.

[0878] Many other baculovirus vectors can be used in place of the vector above, such as pAc373, pVL941, and pAcIM1, as one skilled in the art would readily appreciate, as long as the construct provides appropriately located signals for transcription, translation, secretion and the like, including a signal peptide and an in-frame AUG as required. Such vectors are described, for instance, in Luckow et al., Virology 170:31-39 (1989).

[0879] Specifically, the cDNA sequence contained in the deposited clone, including the AUG initiation codon, is amplified using the PCR protocol described in Example 1. If a naturally occurring signal sequence is used to produce the polypeptide of the present invention, the pA2 vector does not need a second signal peptide. Alternatively, the vector can be modified (pA2 GP) to include a baculovirus leader sequence, using the standard methods described in Summers et al., “A Manual of Methods for Baculovirus Vectors and Insect Cell Culture Procedures,” Texas Agricultural Experimental Station Bulletin No. 1555 (1987).

[0880] The amplified fragment is isolated from a 1% agarose gel using a commercially available kit (“Geneclean,” BIO 101 Inc., La Jolla, Calif.). The fragment then is digested with appropriate restriction enzymes and again purified on a 1% agarose gel.

[0881] The plasmid is digested with the corresponding restriction enzymes and optionally, can be dephosphorylated using calf intestinal phosphatase, using routine procedures known in the art. The DNA is then isolated from a 1% agarose gel using a commercially available kit (“Geneclean” BIO 101 Inc., La Jolla, Calif.).

[0882] The fragment and the dephosphorylated plasmid are ligated together with T4 DNA ligase. E. coli HB101 or other suitable E. coli hosts such as XL-1 Blue (Stratagene Cloning Systems, La Jolla, Calif.) cells are transformed with the ligation mixture and spread on culture plates. Bacteria containing the plasmid are identified by digesting DNA from individual colonies and analyzing the digestion product by gel electrophoresis. The sequence of the cloned fragment is confirmed by DNA sequencing.

[0883] Five μg of a plasmid containing the polynucleotide is co-transfected with 1.0 μg of a commercially available linearized baculovirus DNA (“BaculoGold™ baculovirus DNA”, Pharmingen, San Diego, Calif.), using the lipofection method described by Felgner et al., Proc. Natl. Acad. Sci. USA 84:7413-7417 (1987). One μg of BaculoGold™ virus DNA and 5 μg of the plasmid are mixed in a sterile well of a microtiter plate containing 50 μl of serum-free Grace's medium (Life Technologies Inc., Gaithersburg, Md.). Afterwards, 10 μl Lipofectin plus 90 μl Grace's medium are added, mixed and incubated for 15 minutes at room temperature. Then the transfection mixture is added drop-wise to Sf9 insect cells (ATCC CRL 1711) seeded in a 35 mm tissue culture plate with 1 ml Grace's medium without serum. The plate is then incubated for 5 hours at 27° C. The transfection solution is then removed from the plate and 1 ml of Grace's insect medium supplemented with 10% fetal calf serum is added. Cultivation is then continued at 27° C. for four days.

[0884] After four days the supernatant is collected and a plaque assay is performed, as described by Summers and Smith, supra. An agarose gel with “Blue Gal” (Life Technologies Inc., Gaithersburg) is used to allow easy identification and isolation of gal-expressing clones, which produce blue-stained plaques. (A detailed description of a “plaque assay” of this type can also be found in the user's guide for insect cell culture and baculovirology distributed by Life Technologies Inc., Gaithersburg, page 9-10.) After appropriate incubation, blue stained plaques are picked with the tip of a micropipettor (e.g., Eppendorf). The agar containing the recombinant viruses is then resuspended in a microcentrifuge tube containing 200 μl of Grace's medium and the suspension containing the recombinant baculovirus is used to infect Sf9 cells seeded in 35 mm dishes. Four days later the supernatants of these culture dishes are harvested and then they are stored at 4° C.

[0885] To verify the expression of the polypeptide, Sf9 cells are grown in Grace's medium supplemented with 10% heat-inactivated FBS. The cells are infected with the recombinant baculovirus containing the polynucleotide at a multiplicity of infection (“MOI”) of about 2. If radiolabeled proteins are desired, 6 hours later the medium is removed and is replaced with SF900 II medium minus methionine and cysteine (available from Life Technologies Inc., Rockville, Md.). After 42 hours, 5 μCi of ³⁵S-methionine and 5 μCi ³⁵S-cysteine (available from Amersham) are added. The cells are further incubated for 16 hours and then are harvested by centrifugation. The proteins in the supernatant as well as the intracellular proteins are analyzed by SDS-PAGE followed by autoradiography (if radiolabeled).

[0886] Microsequencing of the amino acid sequence of the amino terminus of purified protein may be used to determine the amino terminal sequence of the produced protein.

### Example 8

[0887] Expression of a Polypeptide in Mammalian Cells

[0888] The polypeptide of the present invention can be expressed in a mammalian cell. A typical mammalian expression vector contains a promoter element, which mediates the initiation of transcription of mRNA, a protein coding sequence, and signals required for the termination of transcription and polyadenylation of the transcript. Additional elements include enhancers, Kozak sequences and intervening sequences flanked by donor and acceptor sites for RNA splicing. Highly efficient transcription is achieved with the early and late promoters from SV40, the long terminal repeats (LTRs) from Retroviruses, e.g., RSV, HTLVI, HIVI and the early promoter of the cytomegalovirus (CMV). However, cellular elements can also be used (e.g., the human actin promoter).

[0889] Suitable expression vectors for use in practicing the present invention include, for example, vectors such as pSVL and pMSG (Pharmacia, Uppsala, Sweden), pRSVcat (ATCC 37152), pSV2dhfr (ATCC 37146), pBC12MI (ATCC 67109), pCMVSport 2.0, and pCMVSport 3.0. Mammalian host cells that could be used include, human Hela, 293, H9 and Jurkat cells, mouse NIH3T3 and C127 cells, Cos 1, Cos 7 and CV1, quail QC1-3 cells, mouse L cells and Chinese hamster ovary (CHO) cells.

[0890] Alternatively, the polypeptide can be expressed in stable cell lines containing the polynucleotide integrated into a chromosome. The co-transfection with a selectable marker such as DHFR, gpt, neomycin, hygromycin allows the identification and isolation of the transfected cells.

[0891] The transfected gene can also be amplified to express large amounts of the encoded protein. The DHFR (dihydrofolate reductase) marker is useful in developing cell lines that carry several hundred or even several thousand copies of the gene of interest. (See, e.g., Alt, F. W., et al., J. Biol. Chem. 253:1357-1370 (1978); Hamlin, J. L. and Ma, C., Biochem. et Biophys. Acta, 1097:107-143 (1990); Page, M. J. and Sydenham, M. A., Biotechnology 9:64-68 (1991).) Another useful selection marker is the enzyme glutamine synthase (GS) (Murphy et al., Biochem J. 227:277-279 (1991); Bebbington et al., Bio/Technology 10:169-175 (1992). Using these markers, the mammalian cells are grown in selective medium and the cells with the highest resistance are selected. These cell lines contain the amplified gene(s) integrated into a chromosome. Chinese hamster ovary (CHO) and NSO cells are often used for the production of proteins.

[0892] Derivatives of the plasmid pSV2-dhfr (ATCC Accession No. 37146), the expression vectors pC4 (ATCC Accession No. 209646) and pC6 (ATCC Accession No.209647) contain the strong promoter (LTR) of the Rous Sarcoma Virus (Cullen et al., Molecular and Cellular Biology, 438-447 (March, 1985)) plus a fragment of the CMV-enhancer (Boshart et al., Cell 41:521-530 (1985).) Multiple cloning sites, e.g., with the restriction enzyme cleavage sites BamHI, XbaI and Asp718, facilitate the cloning of the gene of interest. The vectors also contain the 3′ intron, the polyadenylation and termination signal of the rat preproinsulin gene, and the mouse DHFR gene under control of the SV40 early promoter.

[0893] Specifically, the plasmid pC6, for example, is digested with appropriate restriction enzymes and then dephosphorylated using calf intestinal phosphates by procedures known in the art. The vector is then isolated from a 1% agarose gel.

[0894] A polynucleotide of the present invention is amplified according to the protocol outlined in Example 1. If a naturally occurring signal sequence is used to produce the polypeptide of the present invention, the vector does not need a second signal peptide. Alternatively, if a naturally occurring signal sequence is not used, the vector can be modified to include a heterologous signal sequence. (See, e.g., WO 96/34891.)

[0895] The amplified fragment is isolated from a 1% agarose gel using a commercially available kit (“Geneclean,” BIO 101 Inc., La Jolla, Calif.). The fragment then is digested with appropriate restriction enzymes and again purified on a 1% agarose gel.

[0896] The amplified fragment is then digested with the same restriction enzyme and purified on a 1% agarose gel. The isolated fragment and the dephosphorylated vector are then ligated with T4 DNA ligase. E. coli HB101 or XL-1 Blue cells are then transformed and bacteria are identified that contain the fragment inserted into plasmid pC6 using, for instance, restriction enzyme analysis.

[0897] Chinese hamster ovary cells lacking an active DHFR gene is used for transfection. Five μg of the expression plasmid pC6 or pC4 is cotransfected with 0.5 μg of the plasmid pSVneo using lipofectin (Felgner et al., supra). The plasmid pSV2-neo contains a dominant selectable marker, the neo gene from Tn5 encoding an enzyme that confers resistance to a group of antibiotics including G418. The cells are seeded in alpha minus MEM supplemented with 1 mg/ml G418. After 2 days, the cells are trypsinized and seeded in hybridoma cloning plates (Greiner, Germany) in alpha minus MEM supplemented with 10, 25, or 50 ng/ml of metothrexate plus 1 mg/ml G418. After about 10-14 days single clones are trypsinized and then seeded in 6-well petri dishes or 10 ml flasks using different concentrations of methotrexate (50 nM, 100 nM, 200 nM, 400 nM, 800 nM). Clones growing at the highest concentrations of methotrexate are then transferred to new 6-well plates containing even higher concentrations of methotrexate (1 μM, 2 μM, 5 μM, 10 mM, 20 mM). The same procedure is repeated until clones are obtained which grow at a concentration of 100-200 μM. Expression of the desired gene product is analyzed, for instance, by SDS-PAGE and Western blot or by reversed phase HPLC analysis.

### Example 9

[0898] Protein Fusions

[0899] The polypeptides of the present invention are preferably fused to other proteins. These fusion proteins can be used for a variety of applications. For example, fusion of the present polypeptides to His-tag, HA-tag, protein A, IgG domains, and maltose binding protein facilitates purification. (See Example 5; see also EP A 394,827; Traunecker, et al., Nature 331:84-86 (1988).) Similarly, fusion to IgG-1, IgG-3, and albumin increases the halflife time in vivo. Nuclear localization signals fused to the polypeptides of the present invention can target the protein to a specific subcellular localization, while covalent heterodimer or homodimers can increase or decrease the activity of a fusion protein. Fusion proteins can also create chimeric molecules having more than one function. Finally, fusion proteins can increase solubility and/or stability of the fused protein compared to the non-fused protein. All of the types of fusion proteins described above can be made by modifying the following protocol, which outlines the fusion of a polypeptide to an IgG molecule, or the protocol described in Example 5.

[0900] Briefly, the human Fc portion of the IgG molecule can be PCR amplified, using primers that span the 5′ and 3′ ends of the sequence described below. These primers also should have convenient restriction enzyme sites that will facilitate cloning into an expression vector, preferably a mammalian expression vector.

[0901] For example, if pC4 (Accession No. 209646) is used, the human Fc portion can be ligated into the BamHI cloning site. Note that the 3′ BamHI site should be destroyed. Next, the vector containing the human Fc portion is re-restricted with BamHI, linearizing the vector, and a polynucleotide of the present invention, isolated by the PCR protocol described in Example 1, is ligated into this BamHI site. Note that the polynucleotide is cloned without a stop codon, otherwise a fusion protein will not be produced.

[0902] If the naturally occurring signal sequence is used to produce the polypeptide of the present invention, pC4 does not need a second signal peptide. Alternatively, if the naturally occurring signal sequence is not used, the vector can be modified to include a heterologous signal sequence. (See, e.g., WO 96/34891.)

[0903] Human IgG Fc Region

GGGATCCGGAGCCCAAATCTTCTGACAAAACTCACACATGCCCACCGTGCCCA (SEQ ID NO: 1881)
GCACCTGAATTCGAGGGTGCACCGTCAGTCTTCCTCTTCCCCCCAAAACCCAA
GGACACCCTCATGATCTCCCGGACTCCTGAGGTCACATGCGTGGTGGTGGACG
TAAGCCACGAAGACCCTGAGGTCAAGTTCAACTGGTACGTGGACGGCGTGGA
GGTGCATAATGCCAAGACAAAGCCGCGGGAGGAGCAGTACAACAGCACGTAC
CGTGTGGTCAGCGTCCTCACCGTCCTGCACCAGGACTGGCTGAATGGCAAGGA
GTACAAGTGCAAGGTCTCCAACAAAGCCCTCCCAACCCCCATCGAGAAAACC
ATCTCCAAAGCCAAAGGGCAGCCCCGAGAACCACAGGTGTACACCCTGCCCC
CATCCCGGGATGAGCTGACCAAGAACCAGGTCAGCCTGACCTGCCTGGTCAA
AGGCTTCTATCCAAGCGACATCGCCGTGGAGTGGGAGAGCAATGGGCAGCCG
GAGAACAACTACAAGACCACGCCTCCCGTGCTGGACTCCGACGGCTCCTTCTT
CCTCTACAGCAAGCTCACCGTGGACAAGAGCAGGTGGCAGCAGGGGAACGTC
TTCTCATGCTCCGTGATGCATGAGGCTCTGCACAACCACTACACGCAGAAGAG
CCTCTCCCTGTCTCCGGGTAAATGAGTGCGACGGCCGCGACTCTAGAGGAT

### Example 10

[0904] Production of an Antibody from a Polypeptide

[0905] a) Hybridoma Technology

[0906] The antibodies of the present invention can be prepared by a variety of methods. (See, Current Protocols, Chapter 2.) As one example of such methods, cells expressing a polypeptide of the present invention are administered to an animal to induce the production of sera containing polyclonal antibodies. In a preferred method, a preparation of a polypeptide of the present invention is prepared and purified to render it substantially free of natural contaminants. Such a preparation is then introduced into an animal in order to produce polyclonal antisera of greater specific activity.

[0907] Monoclonal antibodies specific for polypeptide of the present invention are prepared using hybridoma technology. (Kohler et al., Nature 256:495 (1975); Kohler et al., Eur. J. Immunol. 6:511 (1976); Kohler et al., Eur. J. Immunol. 6:292 (1976); Hammerling et al., in: Monoclonal Antibodies and T-Cell Hybridomas, Elsevier, N.Y., pp. 563-681 (1981)). In general, an animal (preferably a mouse) is immunized with polypeptide of the present invention or, more preferably, with a secreted polypeptide of the present invention-expressing cell. Such polypeptide-expressing cells are cultured in any suitable tissue culture medium, preferably in Earle's modified Eagle's medium supplemented with 10% fetal bovine serum (inactivated at about 56° C.), and supplemented with about 10 g/l of nonessential amino acids, about 1,000 U/ml of penicillin, and about 100 μg/ml of streptomycin.

[0908] The splenocytes of such mice are extracted and fused with a suitable myeloma cell line. Any suitable myeloma cell line may be employed in accordance with the present invention; however, it is preferable to employ the parent myeloma cell line (SP2O), available from the ATCC. After fusion, the resulting hybridoma cells are selectively maintained in HAT medium, and then cloned by limiting dilution as described by Wands et al. (Gastroenterology 80:225-232 (1981)). The hybridoma cells obtained through such a selection are then assayed to identify clones which secrete antibodies capable of binding the polypeptide of the present invention.

[0909] Alternatively, additional antibodies capable of binding to a polypeptide of the present invention can be produced in a two-step procedure using anti-idiotypic antibodies. Such a method makes use of the fact that antibodies are themselves antigens, and therefore, it is possible to obtain an antibody which binds to a second antibody. In accordance with this method, protein specific antibodies are used to immunize an animal, preferably a mouse. The splenocytes of such an animal are then used to produce hybridoma cells, and the hybridoma cells are screened to identify clones which produce an antibody whose ability to bind to the polypeptide of the present invention-specific antibody can be blocked by a polypeptide of the present invention. Such antibodies comprise anti-idiotypic antibodies to the polypeptide of the present invention-specific antibody and are used to immunize an animal to induce formation of further polypeptide of the present invention-specific antibodies.

[0910] For in vivo use of antibodies in humans, an antibody is “humanized”. Such antibodies can be produced using genetic constructs derived from hybridoma cells producing the monoclonal antibodies described above. Methods for producing chimeric and humanized antibodies are known in the art and are discussed herein. (See, for review, Morrison, Science 229:1202 (1985); Oi et al., BioTechniques 4:214 (1986); Cabilly et al., U.S. Pat. No. 4,816,567; Taniguchi et al., EP 171496; Morrison et al., EP 173494; Neuberger et al., WO 8601533; Robinson et al., WO 8702671; Boulianne et al., Nature 312:643 (1984); Neuberger et al., Nature 314:268 (1985).)

[0911] b) Isolation of Antibody Fragments Directed Against a Polypeptide of the Present Invention from a Library of scFvs

[0912] Naturally occurring V-genes isolated from human PBLs are constructed into a library of antibody fragments which contain reactivities against a polypeptide of the present invention to which the donor may or may not have been exposed (see e.g., U.S. Pat. No. 5,885,793 incorporated herein by reference in its entirety).

[0913] Rescue of the Library. A library of scFvs is constructed from the RNA of human PBLs as described in PCT publication WO 92/01047. To rescue phage displaying antibody fragments, approximately 109 E. coli harboring the phagemid are used to inoculate 50 ml of 2×TY containing 1% glucose and 100 μg/ml of ampicillin (2×TY-AMP-GLU) and grown to an O.D. of 0.8 with shaking. Five ml of this culture is used to innoculate 50 ml of 2×TY-AMP-GLU, 2×108 TU of delta gene 3 helper (M13 delta gene III, see PCT publication WO 92/01047) are added and the culture incubated at 37° C. for 45 minutes without shaking and then at 37° C. for 45 minutes with shaking. The culture is centrifuged at 4000 r.p.m. for 10 min. and the pellet resuspended in 2 liters of 2×TY containing 100 μg/ml ampicillin and 50 ug/ml kanamycin and grown overnight. Phage are prepared as described in PCT publication WO 92/01047.

[0914] M13 delta gene III is prepared as follows: M13 delta gene III helper phage does not encode gene III protein, hence the phage(mid) displaying antibody fragments have a greater avidity of binding to antigen. Infectious M13 delta gene III particles are made by growing the helper phage in cells harboring a pUC19 derivative supplying the wild type gene III protein during phage morphogenesis. The culture is incubated for 1 hour at 37° C. without shaking and then for a further hour at 37° C. with shaking. Cells are spun down (EEC-Centra 8,400 r.p.m. for 10 min), resuspended in 300 ml 2×TY broth containing 100 μg ampicillin/ml and 25 μg kanamycin/ml (2×TY-AMP-KAN) and grown overnight, shaking at 37° C. Phage particles are purified and concentrated from the culture medium by two PEG-precipitations (Sambrook et al., 1990), resuspended in 2 ml PBS and passed through a 0.45 μm filter (Minisart NML; Sartorius) to give a final concentration of approximately 1013 transducing units/ml (ampicillin-resistant clones).

[0915] Panning of the Library. Immunotubes (Nunc) are coated overnight in PBS with 4 ml of either 100 μg/ml or 10 μg/ml of a polypeptide of the present invention. Tubes are blocked with 2% Marvel-PBS for 2 hours at 37° C. and then washed 3 times in PBS. Approximately 1013 TU of phage is applied to the tube and incubated for 30 minutes at room temperature tumbling on an over and under turntable and then left to stand for another 1.5 hours. Tubes are washed 10 times with PBS 0.1% Tween-20 and 10 times with PBS. Phage are eluted by adding 1 ml of 100 mM triethylamine and rotating 15 minutes on an under and over turntable after which the solution is immediately neutralized with 0.5 ml of 1.0M Tris-HCl, pH 7.4. Phage are then used to infect 10 ml of mid-log E. coli TG1 by incubating eluted phage with bacteria for 30 minutes at 37° C. The E. coli are then plated on TYE plates containing 1% glucose and 100 μg/ml ampicillin. The resulting bacterial library is then rescued with delta gene 3 helper phage as described above to prepare phage for a subsequent round of selection. This process is then repeated for a total of 4 rounds of affinity purification with tube-washing increased to 20 times with PBS, 0.1% Tween-20 and 20 times with PBS for rounds 3 and 4.

[0916] Characterization of Binders. Eluted phage from the 3rd and 4th rounds of selection are used to infect E. coli HB 2151 and soluble scFv is produced (Marks, et al., 1991) from single colonies for assay. ELISAs are performed with microtitre plates coated with either 10 pg/ml of the polypeptide of the present invention in 50 mM bicarbonate pH 9.6. Clones positive in ELISA are further characterized by PCR fingerprinting (see, e.g., PCT publication WO 92/01047) and then by sequencing. These ELISA positive clones may also be further characterized by techniques known in the art, such as, for example, epitope mapping, binding affinity, receptor signal transduction, ability to block or competitively inhibit antibody/antigen binding, and competitive agonistic or antagonistic activity.

### Example 11

[0917] Method of Determining Alterations in a Gene Corresponding to a Polynucleotide

[0918] RNA isolated from entire families or individual patients presenting with a phenotype of interest (such as a disease) is be isolated. cDNA is then generated from these RNA samples using protocols known in the art. (See, Sambrook.) The cDNA is then used as a template for PCR, employing primers surrounding regions of interest in SEQ ID NO:X; and/or the nucleotide sequence of the related cDNA in the cDNA clone contained in a deposited library. Suggested PCR conditions consist of 35 cycles at 95 degrees C. for 30 seconds; 60-120 seconds at 52-58 degrees C.; and 60-120 seconds at 70 degrees C., using buffer solutions described in Sidransky et al., Science 252:706 (1991).

[0919] PCR products are then sequenced using primers labeled at their 5′ end with T4 polynucleotide kinase, employing SequiTherm Polymerase. (Epicentre Technologies). The intron-exon borders of selected exons is also determined and genomic PCR products analyzed to confirm the results. PCR products harboring suspected mutations is then cloned and sequenced to validate the results of the direct sequencing.

[0920] PCR products is cloned into T-tailed vectors as described in Holton et al., Nucleic Acids Research, 19:1156 (1991) and sequenced with T7 polymerase (United States Biochemical). Affected individuals are identified by mutations not present in unaffected individuals.

[0921] Genomic rearrangements are also observed as a method of determining alterations in a gene corresponding to a polynucleotide. Genomic clones isolated according to Example 2 are nick-translated with digoxigenindeoxy-uridine 5′-triphosphate (Boehringer Manheim), and FISH performed as described in Johnson et al., Methods Cell Biol. 35:73-99 (1991). Hybridization with the labeled probe is carried out using a vast excess of human cot-1 DNA for specific hybridization to the corresponding genomic locus.

[0922] Chromosomes are counterstained with 4,6-diamino-2-phenylidole and propidium iodide, producing a combination of C- and R-bands. Aligned images for precise mapping are obtained using a triple-band filter set (Chroma Technology, Brattleboro, Vt.) in combination with a cooled charge-coupled device camera (Photometrics, Tucson, Ariz.) and variable excitation wavelength filters. (Johnson et al., Genet. Anal. Tech. Appl., 8:75 (1991).) Image collection, analysis and chromosomal fractional length measurements are performed using the ISee Graphical Program System. (Inovision Corporation, Durham, N.C.) Chromosome alterations of the genomic region hybridized by the probe are identified as insertions, deletions, and translocations. These alterations are used as a diagnostic marker for an associated disease.

### Example 12

[0923] Method of Detecting Abnormal Levels of a Polypeptide in a Biological Sample

[0924] A polypeptide of the present invention can be detected in a biological sample, and if an increased or decreased level of the polypeptide is detected, this polypeptide is a marker for a particular phenotype. Methods of detection are numerous, and thus, it is understood that one skilled in the art can modify the following assay to fit their particular needs.

[0925] For example, antibody-sandwich ELISAs are used to detect polypeptides in a sample, preferably a biological sample. Wells of a microtiter plate are coated with specific antibodies, at a final concentration of 0.2 to 10 ug/ml. The antibodies are either monoclonal or polyclonal and are produced by the method described in Example 10. The wells are blocked so that non-specific binding of the polypeptide to the well is reduced.

[0926] The coated wells are then incubated for >2 hours at RT with a sample containing the polypeptide. Preferably, serial dilutions of the sample should be used to validate results. The plates are then washed three times with deionized or distilled water to remove unbounded polypeptide.

[0927] Next, 50 ul of specific antibody-alkaline phosphatase conjugate, at a concentration of 25-400 ng, is added and incubated for 2 hours at room temperature. The plates are again washed three times with deionized or distilled water to remove unbounded conjugate.

[0928] Add 75 ul of 4-methylumbelliferyl phosphate (MUP) or p-nitrophenyl phosphate (NPP) substrate solution to each well and incubate 1 hour at room temperature. Measure the reaction by a microtiter plate reader. Prepare a standard curve, using serial dilutions of a control sample, and plot polypeptide concentration on the X-axis (log scale) and fluorescence or absorbance of the Y-axis (linear scale). Interpolate the concentration of the polypeptide in the sample using the standard curve.

### Example 13

[0929] Formulation

[0930] The invention also provides methods of treatment and/or prevention of diseases or disorders (such as, for example, any one or more of the diseases or disorders disclosed herein) by administration to a subject of an effective amount of a Therapeutic. By therapeutic is meant a polynucleotides or polypeptides of the invention (including fragments and variants), agonists or antagonists thereof, and/or antibodies thereto, in combination with a pharmaceutically acceptable carrier type (e.g., a sterile carrier).

[0931] The Therapeutic will be formulated and dosed in a fashion consistent with good medical practice, taking into account the clinical condition of the individual patient (especially the side effects of treatment with the Therapeutic alone), the site of delivery, the method of administration, the scheduling of administration, and other factors known to practitioners. The “effective amount” for purposes herein is thus determined by such considerations.

[0932] As a general proposition, the total pharmaceutically effective amount of the Therapeutic administered parenterally per dose will be in the range of about 1 ug/kg/day to 10 mg/kg/day of patient body weight, although, as noted above, this will be subject to therapeutic discretion. More preferably, this dose is at least 0.01 mg/kg/day, and most preferably for humans between about 0.01 and 1 mg/kg/day for the hormone. If given continuously, the Therapeutic is typically administered at a dose rate of about 1 ug/kg/hour to about 50 ug/kg/hour, either by 1-4 injections per day or by continuous subcutaneous infusions, for example, using a mini-pump. An intravenous bag solution may also be employed. The length of treatment needed to observe changes and the interval following treatment for responses to occur appears to vary depending on the desired effect.

[0933] Therapeutics can be are administered orally, rectally, parenterally, intracistemally, intravaginally, intraperitoneally, topically (as by powders, ointments, gels, drops or transdermal patch), bucally, or as an oral or nasal spray. “Pharmaceutically acceptable carrier” refers to a non-toxic solid, semisolid or liquid filler, diluent, encapsulating material or formulation auxiliary of any. The term “parenteral” as used herein refers to modes of administration which include intravenous, intramuscular, intraperitoneal, intrasternal, subcutaneous and intraarticular injection and infusion.

[0934] Therapeutics of the invention are also suitably administered by sustained-release systems. Suitable examples of sustained-release Therapeutics are administered orally, rectally, parenterally, intracistemally, intravaginally, intraperitoneally, topically (as by powders, ointments, gels, drops or transdermal patch), bucally, or as an oral or nasal spray. “Pharmaceutically acceptable carrier” refers to a non-toxic solid, semisolid or liquid filler, diluent, encapsulating material or formulation auxiliary of any type. The term “parenteral” as used herein refers to modes of administration which include intravenous, intramuscular, intraperitoneal, intrasternal, subcutaneous and intraarticular injection and infusion.

[0935] Therapeutics of the invention are also suitably administered by sustained-release systems. Suitable examples of sustained-release Therapeutics include suitable polymeric materials (such as, for example, semi-permeable polymer matrices in the form of shaped articles, e.g., films, or mirocapsules), suitable hydrophobic materials (for example as an emulsion in an acceptable oil) or ion exchange resins, and sparingly soluble derivatives (such as, for example, a sparingly soluble salt).

[0936] Sustained-release matrices include polylactides (U.S. Pat. No. 3,773,919, EP 58,481), copolymers of L-glutamic acid and gamma-ethyl-L-glutamate (Sidman et al., Biopolymers 22:547-556 (1983)), poly (2-hydroxyethyl methacrylate) (Langer et al., J. Biomed. Mater. Res. 15:167-277 (1981), and Langer, Chem. Tech. 12:98-105 (1982)), ethylene vinyl acetate (Langer et al., Id.) or poly-D-(−)-3-hydroxybutyric acid (EP 133,988).

[0937] Sustained-release Therapeutics also include liposomally entrapped Therapeutics of the invention (see generally, Langer, Science 249:1527-1533 (1990); Treat et al., in Liposomes in the Therapy of Infectious Disease and Cancer, Lopez-Berestein and Fidler (eds.), Liss, New York, pp. 317-327 and 353-365 (1989)). Liposomes containing the Therapeutic are prepared by methods known per se: DE 3,218,121; Epstein et al., Proc. Natl. Acad. Sci. (USA) 82:3688-3692 (1985); Hwang et al., Proc. Natl. Acad. Sci.(USA) 77:4030-4034 (1980); EP 52,322; EP 36,676; EP 88,046; EP 143,949; EP 142,641; Japanese Pat. Appl. 83-118008; U.S. Pat. Nos. 4,485,045 and 4,544,545; and EP 102,324. Ordinarily, the liposomes are of the small (about 200-800 Angstroms) unilamellar type in which the lipid content is greater than about 30 mol. percent cholesterol, the selected proportion being adjusted for the optimal Therapeutic.

[0938] In yet an additional embodiment, the Therapeutics of the invention are delivered by way of a pump (see Langer, supra; Sefton, CRC Crit. Ref. Biomed. Eng. 14:201 (1987); Buchwald et al., Surgery 88:507 (1980); Saudek et al., N. Engl. J. Med. 321:574 (1989)).

[0939] Other controlled release systems are discussed in the review by Langer (Science 249:1527-1533 (1990)).

[0940] For parenteral administration, in one embodiment, the Therapeutic is formulated generally by mixing it at the desired degree of purity, in a unit dosage injectable form (solution, suspension, or emulsion), with a pharmaceutically acceptable carrier, i.e., one that is non-toxic to recipients at the dosages and concentrations employed and is compatible with other ingredients of the formulation. For example, the formulation preferably does not include oxidizing agents and other compounds that are known to be deleterious to the Therapeutic.

[0941] Generally, the formulations are prepared by contacting the Therapeutic uniformly and intimately with liquid carriers or finely divided solid carriers or both. Then, if necessary, the product is shaped into the desired formulation. Preferably the carrier is a parenteral carrier, more preferably a solution that is isotonic with the blood of the recipient. Examples of such carrier vehicles include water, saline, Ringer's solution, and dextrose solution. Non-aqueous vehicles such as fixed oils and ethyl oleate are also useful herein, as well as liposomes.

[0942] The carrier suitably contains minor amounts of additives such as substances that enhance isotonicity and chemical stability. Such materials are non-toxic to recipients at the dosages and concentrations employed, and include buffers such as phosphate, citrate, succinate, acetic acid, and other organic acids or their salts; antioxidants such as ascorbic acid; low molecular weight (less than about ten residues) polypeptides, e.g., polyarginine or tripeptides; proteins, such as serum albumin, gelatin, or immunoglobulins; hydrophilic polymers such as polyvinylpyrrolidone; amino acids, such as glycine, glutamic acid, aspartic acid, or arginine; monosaccharides, disaccharides, and other carbohydrates including cellulose or its derivatives, glucose, manose, or dextrins; chelating agents such as EDTA; sugar alcohols such as mannitol or sorbitol; counterions such as sodium; and/or nonionic surfactants such as polysorbates, poloxamers, or PEG.

[0943] The Therapeutic is typically formulated in such vehicles at a concentration of about 0.1 mg/ml to 100 mg/ml, preferably 1-10 mg/ml, at a pH of about 3 to 8. It will be understood that the use of certain of the foregoing excipients, carriers, or stabilizers will result in the formation of polypeptide salts.

[0944] Any pharmaceutical used for therapeutic administration can be sterile. Sterility is readily accomplished by filtration through sterile filtration membranes (e.g., 0.2 micron membranes). Therapeutics generally are placed into a container having a sterile access port, for example, an intravenous solution bag or vial having a stopper pierceable by a hypodermic injection needle.

[0945] Therapeutics ordinarily will be stored in unit or multi-dose containers, for example, sealed ampoules or vials, as an aqueous solution or as a lyophilized formulation for reconstitution. As an example of a lyophilized formulation, 10-ml vials are filled with 5 ml of sterile-filtered 1% (w/v) aqueous Therapeutic solution, and the resulting mixture is lyophilized. The infusion solution is prepared by reconstituting the lyophilized Therapeutic using bacteriostatic Water-for-Injection.

[0946] The invention also provides a pharmaceutical pack or kit comprising one or more containers filled with one or more of the ingredients of the Therapeutics of the invention. Associated with such container(s) can be a notice in the form prescribed by a governmental agency regulating the manufacture, use or sale of pharmaceuticals or biological products, which notice reflects approval by the agency of manufacture, use or sale for human administration. In addition, the Therapeutics may be employed in conjunction with other therapeutic compounds.

[0947] The Therapeutics of the invention may be administered alone or in combination with adjuvants. Adjuvants that may be administered with the Therapeutics of the invention include, but are not limited to, alum, alum plus deoxycholate (ImmunoAg), MTP-PE (Biocine Corp.), QS21 (Genentech, Inc.), BCG, and MPL. In a specific embodiment, Therapeutics of the invention are administered in combination with alum. In another specific embodiment, Therapeutics of the invention are administered in combination with QS-21. Further adjuvants that may be administered with the Therapeutics of the invention include, but are not limited to, Monophosphoryl lipid immunomodulator, AdjuVax 100a, QS-21, QS-18, CRL1005, Aluminum salts, MF-59, and Virosomal adjuvant technology. Vaccines that may be administered with the Therapeutics of the invention include, but are not limited to, vaccines directed toward protection against MMR (measles, mumps, rubella), polio, varicella, tetanus/diptheria, hepatitis A, hepatitis B, haemophilus influenzae B, whooping cough, pneumonia, influenza, Lyme's Disease, rotavirus, cholera, yellow fever, Japanese encephalitis, poliomyelitis, rabies, typhoid fever, and pertussis. Combinations may be administered either concomitantly, e.g., as an admixture, separately but simultaneously or concurrently; or sequentially. This includes presentations in which the combined agents are administered together as a therapeutic mixture, and also procedures in which the combined agents are administered separately but simultaneously, e.g., as through separate intravenous lines into the same individual. Administration “in combination” further includes the separate administration of one of the compounds or agents given first, followed by the second.

[0948] The Therapeutics of the invention may be administered alone or in combination with other therapeutic agents. Therapeutic agents that may be administered in combination with the Therapeutics of the invention, include but not limited to, other members of the TNF family, chemotherapeutic agents, antibiotics, steroidal and non-steroidal anti-inflammatories, conventional immunotherapeutic agents, cytokines and/or growth factors. Combinations may be administered either concomitantly, e.g., as an admixture, separately but simultaneously or concurrently; or sequentially. This includes presentations in which the combined agents are administered together as a therapeutic mixture, and also procedures in which the combined agents are administered separately but simultaneously, e.g., as through separate intravenous lines into the same individual. Administration “in combination” further includes the separate administration of one of the compounds or agents given first, followed by the second.

[0949] In one embodiment, the Therapeutics of the invention are administered in combination with members of the TNF family. TNF, TNF-related or TNF-like molecules that may be administered with the Therapeutics of the invention include, but are not limited to, soluble forms of TNF-alpha, lymphotoxin-alpha (LT-alpha, also known as TNF-beta), LT-beta (found in complex heterotrimer LT-alpha2-beta), OPGL, FasL, CD27L, CD30L, CD40L, 4-1BBL, DcR3, OX40L, TNF-gamma (International Publication No. WO 96/14328), AIM-I (International Publication No. WO 97/33899), endokine-alpha (International Publication No. WO 98/07880), TR6 (International Publication No. WO 98/30694), OPG, and neutrokine-alpha (International Publication No. WO 98/18921, OX40, and nerve growth factor (NGF), and soluble forms of Fas, CD30, CD27, CD40 and 4-IBB, TR2 (International Publication No. WO 96/34095), DR3 (International Publication No. WO 97/33904), DR4 (International Publication No. WO 98/32856), TR5 (International Publication No. WO 98/30693), TR6 (International Publication No. WO 98/30694), TR7 (International Publication No. WO 98/41629), TRANK, TR9 (International Publication No. WO 98/56892),TR10 (International Publication No. WO 98/54202), 312C2 (International Publication No. WO 98/06842), and TR12, and soluble forms CD154, CD70, and CD153.

[0950] In certain embodiments, Therapeutics of the invention are administered in combination with antiretroviral agents, nucleoside reverse transcriptase inhibitors, non-nucleoside reverse transcriptase inhibitors, and/or protease inhibitors. Nucleoside reverse transcriptase inhibitors that may be administered in combination with the Therapeutics of the invention, include, but are not limited to, RETROVIR™ (zidovudine/AZT), VIDEX™ (didanosine/ddI), HIVID™ (zalcitabine/ddC), ZERIT™ (stavudine/d4T), EPIVIR™ (lamivudine/3TC), and COMBIVIR™ (zidovudine/lamivudine). Non-nucleoside reverse transcriptase inhibitors that may be administered in combination with the Therapeutics of the invention, include, but are not limited to, VIRAMUNE™ (nevirapine), RESCRIPTOR™ (delavirdine), and SUSTIVA™ (efavirenz). Protease inhibitors that may be administered in combination with the Therapeutics of the invention, include, but are not limited to, CRIXIVAN™ (indinavir), NORVIR™ (ritonavir), INVIRASE™ (saquinavir), and VIRACEPT™ (nelfinavir). In a specific embodiment, antiretroviral agents, nucleoside reverse transcriptase inhibitors, non-nucleoside reverse transcriptase inhibitors, and/or protease inhibitors may be used in any combination with Therapeutics of the invention to treat AIDS and/or to prevent or treat HIV infection.

[0951] In other embodiments, Therapeutics of the invention may be administered in combination with anti-opportunistic infection agents. Anti-opportunistic agents that may be administered in combination with the Therapeutics of the invention, include, but are not limited to, TRIMETHOPRIM-SULFAMETHOXAZOLE™, DAPSONE™, PENTAMIDINE™, ATOVAQUONE™, ISONIAZID™, RIFAMPIN™, PYRAZINAMIDE™, ETHAMBUTOL™, RIFABUTIN™, CLARITHROMYCIN™, AZITHROMYCIN™, GANCICLOVIR™, FOSCARNET™, CIDOFOVIR™, FLUCONAZOLE™, ITRACONAZOLE™, KETOCONAZOLE™, ACYCLOVIR™, FAMCICOLVIR™, PYRIMETHAMINE™, LEUCOVORIN™, NEUPOGEN™ (filgrastim/G-CSF), and LEUKINE∩ (sargramostim/GM-CSF). In a specific embodiment, Therapeutics of the invention are used in any combination with TRIMETHOPRIM-SULFAMETHOXAZOLE™, DAPSONE™, PENTAMIDINE™, and/or ATOVAQUONE™ to prophylactically treat or prevent an opportunistic Pneumocystis carinii pneumonia infection. In another specific embodiment, Therapeutics of the invention are used in any combination with ISONIAZID™, RIFAMPIN™, PYRAZINAMIDE™, and/or ETHAMBUTOL™ to prophylactically treat or prevent an opportunistic Mycobacterium avium complex infection. In another specific embodiment, Therapeutics of the invention are used in any combination with RIFABUTIN™, CLARITHROMYCIN™, and/or AZITHROMYCIN™ to prophylactically treat or prevent an opportunistic Mycobacterium tuberculosis infection. In another specific embodiment, Therapeutics of the invention are used in any combination with GANCICLOVIRZ™, FOSCARNET™, and/or CIDOFOVIR™ to prophylactically treat or prevent an opportunistic cytomegalovirus infection. In another specific embodiment, Therapeutics of the invention are used in any combination with FLUCONAZOLE™, ITRACONAZOLE™, and/or KETOCONAZOLE™ to prophylactically treat or prevent an opportunistic fungal infection. In another specific embodiment, Therapeutics of the invention are used in any combination with ACYCLOVIR™ and/or FAMCICOLVIR™ to prophylactically treat or prevent an opportunistic herpes simplex virus type I and/or type II infection. In another specific embodiment, Therapeutics of the invention are used in any combination with PYRIMETHAMINE™ and/or LEUCOVORIN™ to prophylactically treat or prevent an opportunistic Toxoplasma gondii infection. In another specific embodiment, Therapeutics of the invention are used in any combination with LEUCOVORIN™ and/or NEUPOGEN™ to prophylactically treat or prevent an opportunistic bacterial infection.

[0952] In a further embodiment, the Therapeutics of the invention are administered in combination with an antiviral agent. Antiviral agents that may be administered with the Therapeutics of the invention include, but are not limited to, acyclovir, ribavirin, amantadine, and remantidine.

[0953] In a further embodiment, the Therapeutics of the invention are administered in combination with an antibiotic agent. Antibiotic agents that may be administered with the Therapeutics of the invention include, but are not limited to, amoxicillin, beta-lactamases, aminoglycosides, beta-lactam (glycopeptide), beta-lactamases, Clindamycin, chloramphenicol, cephalosporins, ciprofloxacin, ciprofloxacin, erythromycin, fluoroquinolones, macrolides, metronidazole, penicillins, quinolones, rifampin, streptomycin, sulfonamide, tetracyclines, trimethoprim, trimethoprim-sulfamthoxazole, and vancomycin.

[0954] Conventional nonspecific immunosuppressive agents, that may be administered in combination with the Therapeutics of the invention include, but are not limited to, steroids, cyclosporine, cyclosporine analogs, cyclophosphamide methylprednisone, prednisone, azathioprine, FK-506, 15-deoxyspergualin, and other immunosuppressive agents that act by suppressing the function of responding T cells.

[0955] In specific embodiments, Therapeutics of the invention are administered in combination with immunosuppressants. Immunosuppressants preparations that may be administered with the Therapeutics of the invention include, but are not limited to, ORTHOCLONE™ (OKT3), SANDIMMUNE™/NEORAL™/SANGDYA™ (cyclosporin), PROGRAF™ (tacrolimus), CELLCEPT™ (mycophenolate), Azathioprine, glucorticosteroids, and RAPAMUNE™ (sirolimus). In a specific embodiment, immunosuppressants may be used to prevent rejection of organ or bone marrow transplantation.

[0956] In an additional embodiment, Therapeutics of the invention are administered alone or in combination with one or more intravenous immune globulin preparations. Intravenous immune globulin preparations that may be administered with the Therapeutics of the invention include, but not limited to, GAMMAR™, IVEEGAM™, SANDOGLOBULIN™, GAMMAGARD S/D™, and GAMIMUNE™. In a specific embodiment, Therapeutics of the invention are administered in combination with intravenous immune globulin preparations in transplantation therapy (e.g., bone marrow transplant).

[0957] In an additional embodiment, the Therapeutics of the invention are administered alone or in combination with an anti-inflammatory agent. Anti-inflammatory agents that may be administered with the Therapeutics of the invention include, but are not limited to, glucocorticoids and the nonsteroidal anti-inflammatories, aminoarylcarboxylic acid derivatives, arylacetic acid derivatives, arylbutyric acid derivatives, arylcarboxylic acids, arylpropionic acid derivatives, pyrazoles, pyrazolones, salicylic acid derivatives, thiazinecarboxamides, e-acetamidocaproic acid, S-adenosylmethionine, 3-amino-4-hydroxybutyric acid, amixetrine, bendazac, benzydamine, bucolome, difenpiramide, ditazol, emorfazone, guaiazulene, nabumetone, nimesulide, orgotein, oxaceprol, paranyline, perisoxal, pifoxime, proquazone, proxazole, and tenidap.

[0958] In another embodiment, compostions of the invention are administered in combination with a chemotherapeutic agent. Chemotherapeutic agents that may be administered with the Therapeutics of the invention include, but are not limited to, antibiotic derivatives (e.g., doxorubicin, bleomycin, daunorubicin, and dactinomycin); antiestrogens (e.g., tamoxifen); antimetabolites (e.g., fluorouracil, 5-FU, methotrexate, floxuridine, interferon alpha-2b, glutamic acid, plicamycin, mercaptopurine, and 6-thioguanine); cytotoxic agents (e.g., carmustine, BCNU, lomustine, CCNU, cytosine arabinoside, cyclophosphamide, estramustine, hydroxyurea, procarbazine, mitomycin, busulfan, cis-platin, and vincristine sulfate); hormones (e.g., medroxyprogesterone, estramustine phosphate sodium, ethinyl estradiol, estradiol, megestrol acetate, methyltestosterone, diethylstilbestrol diphosphate, chlorotrianisene, and testolactone); nitrogen mustard derivatives (e.g., mephalen, chorambucil, mechlorethamine (nitrogen mustard) and thiotepa); steroids and combinations (e.g., bethamethasone sodium phosphate); and others (e.g., dicarbazine, asparaginase, mitotane, vincristine sulfate, vinblastine sulfate, and etoposide).

[0959] In a specific embodiment, Therapeutics of the invention are administered in combination with CHOP (cyclophosphamide, doxorubicin, vincristine, and prednisone) or any combination of the components of CHOP. In another embodiment, Therapeutics of the invention are administered in combination with Rituximab. In a further embodiment, Therapeutics of the invention are administered with Rituxmab and CHOP, or Rituxmab and any combination of the components of CHOP.

[0960] In an additional embodiment, the Therapeutics of the invention are administered in combination with cytokines. Cytokines that may be administered with the Therapeutics of the invention include, but are not limited to, IL2, IL3, IL4, IL5, IL6, IL7, IL10, IL12, IL13, IL15, anti-CD40, CD40L, IFN-gamma and TNF-alpha. In another embodiment, Therapeutics of the invention may be administered with any interleukin, including, but not limited to, IL-1alpha, IL-1beta, IL-2, IL-3, IL-4, IL-5, IL-6, IL-7, IL-8, IL-9, IL-10, IL-11, IL-12, IL-13, IL-14, IL-15, IL-16, IL-17, IL-18, IL-19, IL-20, and IL-21.

[0961] In an additional embodiment, the Therapeutics of the invention are administered in combination with angiogenic proteins. Angiogenic proteins that may be administered with the Therapeutics of the invention include, but are not limited to, Glioma Derived Growth Factor (GDGF), as disclosed in European Patent Number EP-399816; Platelet Derived Growth Factor-A (PDGF-A), as disclosed in European Patent Number EP-682110; Platelet Derived Growth Factor-B (PDGF-B), as disclosed in European Patent Number EP-282317; Placental Growth Factor (PlGF), as disclosed in International Publication Number WO 92/06194; Placental Growth Factor-2 (PlGF-2), as disclosed in Hauser et al., Gorwth Factors, 4:259-268 (1993); Vascular Endothelial Growth Factor (VEGF), as disclosed in International Publication Number WO 90/13649; Vascular Endothelial Growth Factor-A (VEGF-A), as disclosed in European Patent Number EP-506477; Vascular Endothelial Growth Factor-2 (VEGF-2), as disclosed in International Publication Number WO 96/39515; Vascular Endothelial Growth Factor B (VEGF-3); Vascular Endothelial Growth Factor B-186 (VEGF-B186), as disclosed in International Publication Number WO 96/26736; Vascular Endothelial Growth Factor-D (VEGF-D), as disclosed in International Publication Number WO 98/02543; Vascular Endothelial Growth Factor-D (VEGF-D), as disclosed in International Publication Number WO 98/07832; and Vascular Endothelial Growth Factor-E (VEGF-E), as disclosed in German Patent Number DE19639601. The above mentioned references are incorporated herein by reference herein.

[0962] In an additional embodiment, the Therapeutics of the invention are administered in combination with hematopoietic growth factors. Hematopoietic growth factors that may be administered with the Therapeutics of the invention include, but are not limited to, LEUKINE™ (SARGRAMOSTIM™) and NEUPOGEN™ (FILGRASTIM™).

[0963] In an additional embodiment, the Therapeutics of the invention are administered in combination with Fibroblast Growth Factors. Fibroblast Growth Factors that may be administered with the Therapeutics of the invention include, but are not limited to, FGF-1, FGF-2, FGF-3, FGF-4, FGF-5, FGF-6, FGF-7, FGF-8, FGF-9, FGF-10, FGF-11, FGF-12, FGF-13, FGF-14, and FGF-15.

[0964] In additional embodiments, the Therapeutics of the invention are administered in combination with other therapeutic or prophylactic regimens, such as, for example, radiation therapy.

### Example 14

[0965] Method of Treating Decreased Levels of the Polypeptide

[0966] The present invention relates to a method for treating an individual in need of an increased level of a polypeptide of the invention in the body comprising administering to such an individual a composition comprising a therapeutically effective amount of an agonist of the invention (including polypeptides of the invention). Moreover, it will be appreciated that conditions caused by a decrease in the standard or normal expression level of a polypeptide of the present invention in an individual can be treated by administering the agonist or antagonist of the present invention. Thus, the invention also provides a method of treatment of an individual in need of an increased level of the polypeptide comprising administering to such an individual a Therapeutic comprising an amount of the agonist or antagonist to increase the activity level of the polypeptide in such an individual.

[0967] For example, a patient with decreased levels of a polypeptide receives a daily dose 0.1-100 ug/kg of the agonist or antagonist for six consecutive days. The exact details of the dosing scheme, based on administration and formulation, are provided in Example 13.

### Example 15

[0968] Method of Treating Increased Levels of the Polypeptide

[0969] The present invention also relates to a method of treating an individual in need of a decreased level of a polypeptide of the invention in the body comprising administering to such an individual a composition comprising a therapeutically effective amount of an antagonist of the invention (including polypeptides and antibodies of the invention).

[0970] In one example, antisense technology is used to inhibit production of a polypeptide of the present invention. This technology is one example of a method of decreasing levels of a polypeptide, due to a variety of etiologies, such as cancer.

[0971] For example, a patient diagnosed with abnormally increased levels of a polypeptide is administered intravenously antisense polynucleotides at 0.5, 1.0, 1.5, 2.0 and 3.0 mg/kg day for 21 days. This treatment is repeated after a 7-day rest period if the treatment was well tolerated. The formulation of the antisense polynucleotide is provided in Example 13.

### Example 16

[0972] Method of Treatment Using Gene Therapy-Ex Vivo

[0973] One method of gene therapy transplants fibroblasts, which are capable of expressing a polypeptide, onto a patient. Generally, fibroblasts are obtained from a subject by skin biopsy. The resulting tissue is placed in tissue-culture medium and separated into small pieces. Small chunks of the tissue are placed on a wet surface of a tissue culture flask, approximately ten pieces are placed in each flask. The flask is turned upside down, closed tight and left at room temperature over night. After 24 hours at room temperature, the flask is inverted and the chunks of tissue remain fixed to the bottom of the flask and fresh media (e.g., Ham's F12 media, with 10% FBS, penicillin and streptomycin) is added. The flasks are then incubated at 37 degree C. for approximately one week.

[0974] At this time, fresh media is added and subsequently changed every several days. After an additional two weeks in culture, a monolayer of fibroblasts emerge. The monolayer is trypsinized and scaled into larger flasks.

[0975] pMV-7 (Kirschmeier, P. T. et al., DNA, 7:219-25 (1988)), flanked by the long terminal repeats of the Moloney murine sarcoma virus, is digested with EcoRI and HindIII and subsequently treated with calf intestinal phosphatase. The linear vector is fractionated on agarose gel and purified, using glass beads.

[0976] The cDNA encoding a polypeptide of the present invention can be amplified using PCR primers which correspond to the 5′ and 3′ end sequences respectively as set forth in Example 1 using primers and having appropriate restriction sites and initiation/stop codons, if necessary. Preferably, the 5′ primer contains an EcoRI site and the 3′ primer includes a HindIII site. Equal quantities of the Moloney murine sarcoma virus linear backbone and the amplified EcoRI and HindIII fragment are added together, in the presence of T4 DNA ligase. The resulting mixture is maintained under conditions appropriate for ligation of the two fragments. The ligation mixture is then used to transform bacteria HB101, which are then plated onto agar containing kanamycin for the purpose of confirming that the vector has the gene of interest properly inserted.

[0977] The amphotropic pA317 or GP+am12 packaging cells are grown in tissue culture to confluent density in Dulbecco's Modified Eagles Medium (DMEM) with 10% calf serum (CS), penicillin and streptomycin. The MSV vector containing the gene is then added to the media and the packaging cells transduced with the vector. The packaging cells now produce infectious viral particles containing the gene (the packaging cells are now referred to as producer cells).

[0978] Fresh media is added to the transduced producer cells, and subsequently, the media is harvested from a 10 cm plate of confluent producer cells. The spent media, containing the infectious viral particles, is filtered through a millipore filter to remove detached producer cells and this media is then used to infect fibroblast cells. Media is removed from a sub-confluent plate of fibroblasts and quickly replaced with the media from the producer cells. This media is removed and replaced with fresh media. If the titer of virus is high, then virtually all fibroblasts will be infected and no selection is required. If the titer is very low, then it is necessary to use a retroviral vector that has a selectable marker, such as neo or his. Once the fibroblasts have been efficiently infected, the fibroblasts are analyzed to determine whether protein is produced.

[0979] The engineered fibroblasts are then transplanted onto the host, either alone or after having been grown to confluence on cytodex 3 microcarrier beads.

### Example 17

[0980] Gene Therapy Using Endogenous Genes Corresponding to Polynucleotides of the Invention

[0981] Another method of gene therapy according to the present invention involves operably associating the endogenous polynucleotide sequence of the invention with a promoter via homologous recombination as described, for example, in U.S. Pat. No. 5,641,670, issued Jun. 24, 1997; International Publication No. WO 96/29411, published Sep. 26, 1996; International Publication No. WO 94/12650, published Aug. 4, 1994; Koller et al., Proc. Natl. Acad. Sci. USA, 86:8932-8935 (1989); and Zijlstra et al., Nature, 342:435-438 (1989). This method involves the activation of a gene which is present in the target cells, but which is not expressed in the cells, or is expressed at a lower level than desired.

[0982] Polynucleotide constructs are made which contain a promoter and targeting sequences, which are homologous to the 5′ non-coding sequence of endogenous polynucleotide sequence, flanking the promoter. The targeting sequence will be sufficiently near the 5′ end of the polynucleotide sequence so the promoter will be operably linked to the endogenous sequence upon homologous recombination. The promoter and the targeting sequences can be amplified using PCR. Preferably, the amplified promoter contains distinct restriction enzyme sites on the 5′ and 3′ ends. Preferably, the 3′ end of the first targeting sequence contains the same restriction enzyme site as the 5′ end of the amplified promoter and the 5′ end of the second targeting sequence contains the same restriction site as the 3′ end of the amplified promoter.

[0983] The amplified promoter and the amplified targeting sequences are digested with the appropriate restriction enzymes and subsequently treated with calf intestinal phosphatase. The digested promoter and digested targeting sequences are added together in the presence of T4 DNA ligase. The resulting mixture is maintained under conditions appropriate for ligation of the two fragments. The construct is size fractionated on an agarose gel then purified by phenol extraction and ethanol precipitation.

[0984] In this Example, the polynucleotide constructs are administered as naked polynucleotides via electroporation. However, the polynucleotide constructs may also be administered with transfection-facilitating agents, such as liposomes, viral sequences, viral particles, precipitating agents, etc. Such methods of delivery are known in the art.

[0985] Once the cells are transfected, homologous recombination will take place which results in the promoter being operably linked to the endogenous polynucleotide sequence. This results in the expression of polynucleotide corresponding to the polynucleotide in the cell. Expression may be detected by immunological staining, or any other method known in the art.

[0986] Fibroblasts are obtained from a subject by skin biopsy. The resulting tissue is placed in DMEM+10% fetal calf serum. Exponentially growing or early stationary phase fibroblasts are trypsinized and rinsed from the plastic surface with nutrient medium. An aliquot of the cell suspension is removed for counting, and the remaining cells are subjected to centrifugation. The supernatant is aspirated and the pellet is resuspended in 5 ml of electroporation buffer (20 mM HEPES pH 7.3, 137 mM NaCl, 5 mM KCl, 0.7 mM Na₂ HPO₄, 6 mM dextrose). The cells are recentrifuged, the supernatant aspirated, and the cells resuspended in electroporation buffer containing 1 mg/ml acetylated bovine serum albumin. The final cell suspension contains approximately 3×10⁶ cells/ml. Electroporation should be performed immediately following resuspension.

[0987] Plasmid DNA is prepared according to standard techniques. For example, to construct a plasmid for targeting to the locus corresponding to the polynucleotide of the invention, plasmid pUC18 (MBI Fermentas, Amherst, N.Y.) is digested with HindIII. The CMV promoter is amplified by PCR with an XbaI site on the 5′ end and a BamHI site on the 3′end. Two non-coding sequences are amplified via PCR: one non-coding sequence (fragment 1) is amplified with a HindIII site at the 5′ end and an Xba site at the 3′end; the other non-coding sequence (fragment 2) is amplified with a BamHI site at the 5′end and a HindIII site at the 3′end. The CMV promoter and the fragments (1 and 2) are digested with the appropriate enzymes (CMV promoter—XbaI and BamHI; fragment 1—XbaI; fragment 2—BamHI) and ligated together. The resulting ligation product is digested with HindIII, and ligated with the HindIII-digested pUC18 plasmid.

[0988] Plasmid DNA is added to a sterile cuvette with a 0.4 cm electrode gap (Bio-Rad). The final DNA concentration is generally at least 120 μg/ml. 0.5 ml of the cell suspension (containing approximately 1.5.×10⁶ cells) is then added to the cuvette, and the cell suspension and DNA solutions are gently mixed. Electroporation is performed with a Gene-Pulser apparatus (Bio-Rad). Capacitance and voltage are set at 960 μF and 250-300 V, respectively. As voltage increases, cell survival decreases, but the percentage of surviving cells that stably incorporate the introduced DNA into their genome increases dramatically. Given these parameters, a pulse time of approximately 14-20 mSec should be observed.

[0989] Electroporated cells are maintained at room temperature for approximately 5 min, and the contents of the cuvette are then gently removed with a sterile transfer pipette. The cells are added directly to 10 ml of prewarmed nutrient media (DMEM with 15% calf serum) in a 10 cm dish and incubated at 37 degree C. The following day, the media is aspirated and replaced with 10 ml of fresh media and incubated for a further 16-24 hours.

[0990] The engineered fibroblasts are then injected into the host, either alone or after having been grown to confluence on cytodex 3 microcarrier beads. The fibroblasts now produce the protein product. The fibroblasts can then be introduced into a patient as described above.

### Example 18

[0991] Method of Treatment Using Gene Therapy—In Vivo

[0992] Another aspect of the present invention is using in vivo gene therapy methods to treat disorders, diseases and conditions. The gene therapy method relates to the introduction of naked nucleic acid (DNA, RNA, and antisense DNA or RNA) sequences into an animal to increase or decrease the expression of the polypeptide. The polynucleotide of the present invention may be operatively linked to a promoter or any other genetic elements necessary for the expression of the polypeptide by the target tissue. Such gene therapy and delivery techniques and methods are known in the art, see, for example, WO90/11092, WO98/11779; U.S. Pat. Nos. 5,693,622, 5,705,151, 5,580,859; Tabata et al., Cardiovasc. Res. 35(3):470-479 (1997); Chao et al., Pharmacol. Res. 35(6):517-522 (1997); Wolff, Neuromuscul. Disord. 7(5):314-318 (1997); Schwartz et al., Gene Ther. 3(5):405-411 (1996); Tsurumi et al., Circulation 94(12):3281-3290 (1996) (incorporated herein by reference).

[0993] The polynucleotide constructs may be delivered by any method that delivers injectable materials to the cells of an animal, such as, injection into the interstitial space of tissues (heart, muscle, skin, lung, liver, intestine and the like). The polynucleotide constructs can be delivered in a pharmaceutically acceptable liquid or aqueous carrier.

[0994] The term “naked” polynucleotide, DNA or RNA, refers to sequences that are free from any delivery vehicle that acts to assist, promote, or facilitate entry into the cell, including viral sequences, viral particles, liposome formulations, lipofectin or precipitating agents and the like. However, the polynucleotides of the present invention may also be delivered in liposome formulations (such as those taught in Felgner P. L. et al. (1995) Ann. NY Acad. Sci. 772:126-139 and Abdallah B. et al. (1995) Biol. Cell 85(1):1-7) which can be prepared by methods well known to those skilled in the art.

[0995] The polynucleotide vector constructs used in the gene therapy method are preferably constructs that will not integrate into the host genome nor will they contain sequences that allow for replication. Any strong promoter known to those skilled in the art can be used for driving the expression of DNA. Unlike other gene therapies techniques, one major advantage of introducing naked nucleic acid sequences into target cells is the transitory nature of the polynucleotide synthesis in the cells. Studies have shown that non-replicating DNA sequences can be introduced into cells to provide production of the desired polypeptide for periods of up to six months.

[0996] The polynucleotide construct can be delivered to the interstitial space of tissues within the an animal, including of muscle, skin, brain, lung, liver, spleen, bone marrow, thymus, heart, lymph, blood, bone, cartilage, pancreas, kidney, gall bladder, stomach, intestine, testis, ovary, uterus, rectum, nervous system, eye, gland, and connective tissue. Interstitial space of the tissues comprises the intercellular fluid, mucopolysaccharide matrix among the reticular fibers of organ tissues, elastic fibers in the walls of vessels or chambers, collagen fibers of fibrous tissues, or that same matrix within connective tissue ensheathing muscle cells or in the lacunae of bone. It is similarly the space occupied by the plasma of the circulation and the lymph fluid of the lymphatic channels. Delivery to the interstitial space of muscle tissue is preferred for the reasons discussed below. They may be conveniently delivered by injection into the tissues comprising these cells. They are preferably delivered to and expressed in persistent, non-dividing cells which are differentiated, although delivery and expression may be achieved in non-differentiated or less completely differentiated cells, such as, for example, stem cells of blood or skin fibroblasts. In vivo muscle cells are particularly competent in their ability to take up and express polynucleotides.

[0997] For the naked polynucleotide injection, an effective dosage amount of DNA or RNA will be in the range of from about 0.05 g/kg body weight to about 50 mg/kg body weight. Preferably the dosage will be from about 0.005 mg/kg to about 20 mg/kg and more preferably from about 0.05 mg/kg to about 5 mg/kg. Of course, as the artisan of ordinary skill will appreciate, this dosage will vary according to the tissue site of injection. The appropriate and effective dosage of nucleic acid sequence can readily be determined by those of ordinary skill in the art and may depend on the condition being treated and the route of administration. The preferred route of administration is by the parenteral route of injection into the interstitial space of tissues. However, other parenteral routes may also be used, such as, inhalation of an aerosol formulation particularly for delivery to lungs or bronchial tissues, throat or mucous membranes of the nose. In addition, naked polynucleotide constructs can be delivered to arteries during angioplasty by the catheter used in the procedure.

[0998] The dose response effects of injected polynucleotide in muscle in vivo is determined as follows. Suitable template DNA for production of mRNA coding for polypeptide of the present invention is prepared in accordance with a standard recombinant DNA methodology. The template DNA, which may be either circular or linear, is either used as naked DNA or complexed with liposomes. The quadriceps muscles of mice are then injected with various amounts of the template DNA.

[0999] Five to six week old female and male Balb/C mice are anesthetized by intraperitoneal injection with 0.3 ml of 2.5% Avertin. A 1.5 cm incision is made on the anterior thigh, and the quadriceps muscle is directly visualized. The template DNA is injected in 0.1 ml of carrier in a 1 cc syringe through a 27 gauge needle over one minute, approximately 0.5 cm from the distal insertion site of the muscle into the knee and about 0.2 cm deep. A suture is placed over the injection site for future localization, and the skin is closed with stainless steel clips.

[1000] After an appropriate incubation time (e.g., 7 days) muscle extracts are prepared by excising the entire quadriceps. Every fifth 15 um cross-section of the individual quadriceps muscles is histochemically stained for protein expression. A time course for protein expression may be done in a similar fashion except that quadriceps from different mice are harvested at different times. Persistence of DNA in muscle following injection may be determined by Southern blot analysis after preparing total cellular DNA and HIRT supernatants from injected and control mice. The results of the above experimentation in mice can be use to extrapolate proper dosages and other treatment parameters in humans and other animals using naked DNA.

### Example 19

[1001] Transgenic Animals

[1002] The polypeptides of the invention can also be expressed in transgenic animals. Animals of any species, including, but not limited to, mice, rats, rabbits, hamsters, guinea pigs, pigs, micro-pigs, goats, sheep, cows and non-human primates, e.g., baboons, monkeys, and chimpanzees may be used to generate transgenic animals. In a specific embodiment, techniques described herein or otherwise known in the art, are used to express polypeptides of the invention in humans, as part of a gene therapy protocol.

[1003] Any technique known in the art may be used to introduce the transgene (i.e., polynucleotides of the invention) into animals to produce the founder lines of transgenic animals. Such techniques include, but are not limited to, pronuclear microinjection (Paterson et al., Appl. Microbiol. Biotechnol. 40:691-698 (1994); Carver et al., Biotechnology (NY) 11:1263-1270 (1993); Wright et al., Biotechnology (NY) 9:830-834 (1991); and Hoppe et al., U.S. Pat. No. 4,873,191 (1989)); retrovirus mediated gene transfer into germ lines (Van der Putten et al., Proc. Natl. Acad. Sci., USA 82:6148-6152 (1985)), blastocysts or embryos; gene targeting in embryonic stem cells (Thompson et al., Cell 56:313-321 (1989)); electroporation of cells or embryos (Lo, 1983, Mol Cell. Biol. 3:1803-1814 (1983)); introduction of the polynucleotides of the invention using a gene gun (see, e.g., Ulmer et al., Science 259:1745 (1993); introducing nucleic acid constructs into embryonic pleuripotent stem cells and transferring the stem cells back into the blastocyst; and sperm-mediated gene transfer (Lavitrano et al., Cell 57:717-723 (1989); etc. For a review of such techniques, see Gordon, “Transgenic Animals,” Intl. Rev. Cytol. 115:171-229 (1989), which is incorporated by reference herein in its entirety.

[1004] Any technique known in the art may be used to produce transgenic clones containing polynucleotides of the invention, for example, nuclear transfer into enucleated oocytes of nuclei from cultured embryonic, fetal, or adult cells induced to quiescence (Campell et al., Nature 380:64-66 (1996); Wilmut et al., Nature 385:810-813 (1997)).

[1005] The present invention provides for transgenic animals that carry the transgene in all their cells, as well as animals which carry the transgene in some, but not all their cells, i.e., mosaic animals or chimeric. The transgene may be integrated as a single transgene or as multiple copies such as in concatamers, e.g., head-to-head tandems or head-to-tail tandems. The transgene may also be selectively introduced into and activated in a particular cell type by following, for example, the teaching of Lasko et al. (Lasko et al., Proc. Natl. Acad. Sci. USA 89:6232-6236 (1992)). The regulatory sequences required for such a cell-type specific activation will depend upon the particular cell type of interest, and will be apparent to those of skill in the art. When it is desired that the polynucleotide transgene be integrated into the chromosomal site of the endogenous gene, gene targeting is preferred. Briefly, when such a technique is to be utilized, vectors containing some nucleotide sequences homologous to the endogenous gene are designed for the purpose of integrating, via homologous recombination with chromosomal sequences, into and disrupting the function of the nucleotide sequence of the endogenous gene. The transgene may also be selectively introduced into a particular cell type, thus inactivating the endogenous gene in only that cell type, by following, for example, the teaching of Gu et al. (Gu et al., Science 265:103-106 (1994)). The regulatory sequences required for such a cell-type specific inactivation will depend upon the particular cell type of interest, and will be apparent to those of skill in the art.

[1006] Once transgenic animals have been generated, the expression of the recombinant gene may be assayed utilizing standard techniques. Initial screening may be accomplished by Southern blot analysis or PCR techniques to analyze animal tissues to verify that integration of the transgene has taken place. The level of mRNA expression of the transgene in the tissues of the transgenic animals may also be assessed using techniques which include, but are not limited to, Northern blot analysis of tissue samples obtained from the animal, in situ hybridization analysis, and reverse transcriptase-PCR (rt-PCR). Samples of transgenic gene-expressing tissue may also be evaluated immunocytochemically or immunohistochemically using antibodies specific for the transgene product.

[1007] Once the founder animals are produced, they may be bred, inbred, outbred, or crossbred to produce colonies of the particular animal. Examples of such breeding strategies include, but are not limited to: outbreeding of founder animals with more than one integration site in order to establish separate lines; inbreeding of separate lines in order to produce compound transgenics that express the transgene at higher levels because of the effects of additive expression of each transgene; crossing of heterozygous transgenic animals to produce animals homozygous for a given integration site in order to both augment expression and eliminate the need for screening of animals by DNA analysis; crossing of separate homozygous lines to produce compound heterozygous or homozygous lines; and breeding to place the transgene on a distinct background that is appropriate for an experimental model of interest.

[1008] Transgenic animals of the invention have uses which include, but are not limited to, animal model systems useful in elaborating the biological function of polypeptides of the present invention, studying conditions and/or disorders associated with aberrant expression, and in screening for compounds effective in ameliorating such conditions and/or disorders.

### Example 20

[1009] Knock-Out Animals

[1010] Endogenous gene expression can also be reduced by inactivating or “knocking out” the gene and/or its promoter using targeted homologous recombination. (E.g., see Smithies et al., Nature 317:230-234 (1985); Thomas & Capecchi, Cell 51:503-512 (1987); Thompson et al., Cell 5:313-321 (1989); each of which is incorporated by reference herein in its entirety). For example, a mutant, non-functional polynucleotide of the invention (or a completely unrelated DNA sequence) flanked by DNA homologous to the endogenous polynucleotide sequence (either the coding regions or regulatory regions of the gene) can be used, with or without a selectable marker and/or a negative selectable marker, to transfect cells that express polypeptides of the invention in vivo. In another embodiment, techniques known in the art are used to generate knockouts in cells that contain, but do not express the gene of interest. Insertion of the DNA construct, via targeted homologous recombination, results in inactivation of the targeted gene. Such approaches are particularly suited in research and agricultural fields where modifications to embryonic stem cells can be used to generate animal offspring with an inactive targeted gene (e.g., see Thomas & Capecchi 1987 and Thompson 1989, supra). However this approach can be routinely adapted for use in humans provided the recombinant DNA constructs are directly administered or targeted to the required site in vivo using appropriate viral vectors that will be apparent to those of skill in the art.

[1011] In further embodiments of the invention, cells that are genetically engineered to express the polypeptides of the invention, or alternatively, that are genetically engineered not to express the polypeptides of the invention (e.g., knockouts) are administered to a patient in vivo. Such cells may be obtained from the patient (i.e., animal, including human) or an MHC compatible donor and can include, but are not limited to fibroblasts, bone marrow cells, blood cells (e., lymphocytes), adipocytes, muscle cells, endothelial cells etc. The cells are genetically engineered in vitro using recombinant DNA techniques to introduce the coding sequence of polypeptides of the invention into the cells, or alternatively, to disrupt the coding sequence and/or endogenous regulatory sequence associated with the polypeptides of the invention, e.g., by transduction (using viral vectors, and preferably vectors that integrate the transgene into the cell genome) or transfection procedures, including, but not limited to, the use of plasmids, cosmids, YACs, naked DNA, electroporation, liposomes, etc. The coding sequence of the polypeptides of the invention can be placed under the control of a strong constitutive or inducible promoter or promoter/enhancer to achieve expression, and preferably secretion, of the polypeptides of the invention. The engineered cells which express and preferably secrete the polypeptides of the invention can be introduced into the patient systemically, e.g., in the circulation, or intraperitoneally.

[1012] Alternatively, the cells can be incorporated into a matrix and implanted in the body, e.g., genetically engineered fibroblasts can be implanted as part of a skin graft; genetically engineered endothelial cells can be implanted as part of a lymphatic or vascular graft. (See, for example, Anderson et al. U.S. Pat. No. 5,399,349; and Mulligan & Wilson, U.S. Pat. No. 5,460,959 each of which is incorporated by reference herein in its entirety).

[1013] When the cells to be administered are non-autologous or non-MHC compatible cells, they can be administered using well known techniques which prevent the development of a host immune response against the introduced cells. For example, the cells may be introduced in an encapsulated form which, while allowing for an exchange of components with the immediate extracellular environment, does not allow the introduced cells to be recognized by the host immune system.

[1014] Transgenic and “knock-out” animals of the invention have uses which include, but are not limited to, animal model systems useful in elaborating the biological function of polypeptides of the present invention, studying conditions and/or disorders associated with aberrant expression, and in screening for compounds effective in ameliorating such conditions and/or disorders.

### Example 21

[1015] Assays Detecting Stimulation or Inhibition of B Cell Proliferation and Differentiation

[1016] Generation of functional humoral immune responses requires both soluble and cognate signaling between B-lineage cells and their microenvironment. Signals may impart a positive stimulus that allows a B-lineage cell to continue its programmed development, or a negative stimulus that instructs the cell to arrest its current developmental pathway. To date, numerous stimulatory and inhibitory signals have been found to influence B cell responsiveness including IL-2, IL-4, IL-5, IL-6, IL-7, IL10, IL-13, IL-14 and IL-15. Interestingly, these signals are by themselves weak effectors but can, in combination with various co-stimulatory proteins, induce activation, proliferation, differentiation, homing, tolerance and death among B cell populations.

[1017] One of the best studied classes of B-cell co-stimulatory proteins is the TNF-superfamily. Within this family CD40, CD27, and CD30 along with their respective ligands CD154, CD70, and CD153 have been found to regulate a variety of immune responses. Assays which allow for the detection and/or observation of the proliferation and differentiation of these B-cell populations and their precursors are valuable tools in determining the effects various proteins may have on these B-cell populations in terms of proliferation and differentiation. Listed below are two assays designed to allow for the detection of the differentiation, proliferation, or inhibition of B-cell populations and their precursors.

[1018] In Vitro Assay—Agonists or antagonists of the invention can be assessed for its ability to induce activation, proliferation, differentiation or inhibition and/or death in B-cell populations and their precursors. The activity of the agonists or antagonists of the invention on purified human tonsillar B cells, measured qualitatively over the dose range from 0.1 to 10,000 ng/mL, is assessed in a standard B-lymphocyte co-stimulation assay in which purified tonsillar B cells are cultured in the presence of either formalin-fixed Staphylococcus aureus Cowan I (SAC) or immobilized anti-human IgM antibody as the priming agent. Second signals such as IL-2 and IL-15 synergize with SAC and IgM crosslinking to elicit B cell proliferation as measured by tritiated-thymidine incorporation. Novel synergizing agents can be readily identified using this assay. The assay involves isolating human tonsillar B cells by magnetic bead (MACS) depletion of CD3-positive cells. The resulting cell population is greater than 95% B cells as assessed by expression of CD45R(B220).

[1019] Various dilutions of each sample are placed into individual wells of a 96-well plate to which are added 10⁵ B-cells suspended in culture medium (RPMI 1640 containing 10% FBS, 5×10⁻⁵M 2ME, 100 U/ml penicillin, 10 ug/ml streptomycin, and 10⁻⁵ dilution of SAC) in a total volume of 150 ul. Proliferation or inhibition is quantitated by a 20 h pulse (1 uCi/well) with 3H-thymidine (6.7 Ci/mM) beginning 72 h post factor addition. The positive and negative controls are IL2 and medium respectively.

[1020] In Vivo Assay—BALB/c mice are injected (i.p.) twice per day with buffer only, or 2 mg/Kg of agonists or antagonists of the invention, or truncated forms thereof. Mice receive this treatment for 4 consecutive days, at which time they are sacrificed and various tissues and serum collected for analyses. Comparison of H&E sections from normal spleens and spleens treated with agonists or antagonists of the invention identify the results of the activity of the agonists or antagonists on spleen cells, such as the diffusion of peri-arterial lymphatic sheaths, and/or significant increases in the nucleated cellularity of the red pulp regions, which may indicate the activation of the differentiation and proliferation of B-cell populations. Immunohistochemical studies using a B cell marker, anti-CD45R(B220), are used to determine whether any physiological changes to splenic cells, such as splenic disorganization, are due to increased B-cell representation within loosely defined B-cell zones that infiltrate established T-cell regions.

[1021] Flow cytometric analyses of the spleens from mice treated with agonist or antagonist is used to indicate whether the agonists or antagonists specifically increases the proportion of ThB+, CD45R(B220)dull B cells over that which is observed in control mice. Likewise, a predicted consequence of increased mature B-cell representation in vivo is a relative increase in serum Ig titers. Accordingly, serum IBM and IgA levels are compared between buffer and agonists or antagonists-treated mice.

[1022] The studies described in this example tested activity of agonists or antagonists of the invention. However, one skilled in the art could easily modify the exemplified studies to test the activity of polynucleotides or polypeptides of the invention (e.g., gene therapy).

### Example 22

[1023] T Cell Proliferation Assay

[1024] A CD3-induced proliferation assay is performed on PBMCs and is measured by the uptake of ³H-thymidine. The assay is performed as follows. Ninety-six well plates are coated with 100 μl/well of mAb to CD3 (HIT3a, Pharmingen) or isotype-matched control mAb (B33.1) overnight at 4 degrees C. (1 μg/ml in 0.05M bicarbonate buffer, pH 9.5), then washed three times with PBS. PBMC are isolated by F/H gradient centrifugation from human peripheral blood and added to quadruplicate wells (5×10⁴/well) of mAb coated plates in RPMI containing 10% FCS and P/S in the presence of varying concentrations of agonists or antagonists of the invention (total volume 200 ul). Relevant protein buffer and medium alone are controls. After 48 hr. culture at 37 degrees C., plates are spun for 2 min. at 1000 rpm and 100 μl of supernatant is removed and stored −20 degrees C. for measurement of IL-2 (or other cytokines) if effect on proliferation is observed. Wells are supplemented with 100 ul of medium containing 0.5 uCi of ³H-thymidine and cultured at 37 degrees C. for 18-24 hr. Wells are harvested and incorporation of ³H-thymidine used as a measure of proliferation. Anti-CD3 alone is the positive control for proliferation. IL-2 (100 U/ml) is also used as a control which enhances proliferation. Control antibody which does not induce proliferation of T cells is used as the negative controls for the effects of agonists or antagonists of the invention.

[1025] The studies described in this example tested activity of agonists or antagonists of the invention. However, one skilled in the art could easily modify the exemplified studies to test the activity of polynucleotides or polypeptides of the invention (e.g., gene therapy).

### Example 23

[1026] Effect of Agonists or Antagonists of the Invention on the Expression of MHC Class II, Costimulatory and Adhesion Molecules and Cell Differentiation of Monocytes and Monocyte-Derived Human Dendritic Cells

[1027] Dendritic cells are generated by the expansion of proliferating precursors found in the peripheral blood: adherent PBMC or elutriated monocytic fractions are cultured for 7-10 days with GM-CSF (50 ng/ml) and IL-4 (20 ng/ml). These dendritic cells have the characteristic phenotype of immature cells (expression of CD1, CD80, CD86, CD40 and MHC class II antigens). Treatment with activating factors, such as TNF-α, causes a rapid change in surface phenotype (increased expression of MHC class I and II, costimulatory and adhesion molecules, downregulation of FCγRII, upregulation of CD83). These changes correlate with increased antigen-presenting capacity and with functional maturation of the dendritic cells.

[1028] FACS analysis of surface antigens is performed as follows. Cells are treated 1-3 days with increasing concentrations of agonist or antagonist of the invention or LPS (positive control), washed with PBS containing 1% BSA and 0.02 mM sodium azide, and then incubated with 1:20 dilution of appropriate FITC- or PE-labeled monoclonal antibodies for 30 minutes at 4 degrees C. After an additional wash, the labeled cells are analyzed by flow cytometry on a FACScan (Becton Dickinson).

[1029] Effect on the production of cytokines. Cytokines generated by dendritic cells, in particular IL-12, are important in the initiation of T-cell dependent immune responses. IL-12 strongly influences the development of Thl helper T-cell immune response, and induces cytotoxic T and NK cell function. An ELISA is used to measure the IL-12 release as follows. Dendritic cells (10⁶/ml) are treated with increasing concentrations of agonists or antagonists of the invention for 24 hours. LPS (100 ng/ml) is added to the cell culture as positive control. Supernatants from the cell cultures are then collected and analyzed for IL-12 content using commercial ELISA kit (e..g, R & D Systems (Minneapolis, Minn.)). The standard protocols provided with the kits are used.

[1030] Effect on the expression of MHC Class II, costimulatory and adhesion molecules. Three major families of cell surface antigens can be identified on monocytes: adhesion molecules, molecules involved in antigen presentation, and Fc receptor. Modulation of the expression of MHC class II antigens and other costimulatory molecules, such as B7 and ICAM-1, may result in changes in the antigen presenting capacity of monocytes and ability to induce T cell activation. Increase expression of Fc receptors may correlate with improved monocyte cytotoxic activity, cytokine release and phagocytosis.

[1031] FACS analysis is used to examine the surface antigens as follows. Monocytes are treated 1-5 days with increasing concentrations of agonists or antagonists of the invention or LPS (positive control), washed with PBS containing 1% BSA and 0.02 mM sodium azide, and then incubated with 1:20 dilution of appropriate FITC- or PE-labeled monoclonal antibodies for 30 minutes at 4 degrees C. After an additional wash, the labeled cells are analyzed by flow cytometry on a FACScan (Becton Dickinson).

[1032] Monocyte activation and/or increased survival. Assays for molecules that activate (or alternatively, inactivate) monocytes and/or increase monocyte survival (or alternatively, decrease monocyte survival) are known in the art and may routinely be applied to determine whether a molecule of the invention functions as an inhibitor or activator of monocytes. Agonists or antagonists of the invention can be screened using the three assays described below. For each of these assays, Peripheral blood mononuclear cells (PBMC) are purified from single donor leukopacks (American Red Cross, Baltimore, Md.) by centrifugation through a Histopaque gradient (Sigma). Monocytes are isolated from PBMC by counterflow centrifugal elutriation.

[1033] Monocyte Survival Assay. Human peripheral blood monocytes progressively lose viability when cultured in absence of serum or other stimuli. Their death results from internally regulated process (apoptosis). Addition to the culture of activating factors, such as TNF-alpha dramatically improves cell survival and prevents DNA fragmentation. Propidium iodide (PI) staining is used to measure apoptosis as follows. Monocytes are cultured for 48 hours in polypropylene tubes in serum-free medium (positive control), in the presence of 100 ng/ml TNF-alpha (negative control), and in the presence of varying concentrations of the compound to be tested. Cells are suspended at a concentration of 2×10⁶/ml in PBS containing PI at a final concentration of 5 μg/ml, and then incubaed at room temperature for 5 minutes before FACScan analysis. PI uptake has been demonstrated to correlate with DNA fragmentation in this experimental paradigm.

[1034] Effect on cytokine release. An important function of monocytes/macrophages is their regulatory activity on other cellular populations of the immune system through the release of cytokines after stimulation. An ELISA to measure cytokine release is performed as follows. Human monocytes are incubated at a density of 5×10⁵ cells/ml with increasing concentrations of agonists or antagonists of the invention and under the same conditions, but in the absence of agonists or antagonists. For IL-12 production, the cells are primed overnight with IFN (100 U/ml) in presence of agonist or antagonist of the invention. LPS (10 ng/ml) is then added. Conditioned media are collected after 24 h and kept frozen until use. Measurement of TNF-alpha, IL-10, MCP-1 and IL-8 is then performed using a commercially available ELISA kit (e. g, R & D Systems (Minneapolis, Minn.)) and applying the standard protocols provided with the kit.

[1035] Oxidative burst. Purified monocytes are plated in 96-w plate at 2-1×10⁵ cell/well. Increasing concentrations of agonists or antagonists of the invention are added to the wells in a total volume of 0.2 ml culture medium (RPMI 1640+10% FCS, glutamine and antibiotics). After 3 days incubation, the plates are centrifuged and the medium is removed from the wells. To the macrophage monolayers, 0.2 ml per well of phenol red solution (140 mM NaCl, 10 mM potassium phosphate buffer pH 7.0, 5.5 mM dextrose, 0.56 mM phenol red and 19 U/ml of HRPO) is added, together with the stimulant (200 nM PMA). The plates are incubated at 37° C. for 2 hours and the reaction is stopped by adding 20 μl 1N NaOH per well. The absorbance is read at 610 nm. To calculate the amount of H₂O₂ produced by the macrophages, a standard curve of a H₂O₂ solution of known molarity is performed for each experiment.

[1036] The studies described in this example tested activity of agonists or antagonists of the invention. However, one skilled in the art could easily modify the exemplified studies to test the activity of polynucleotides or polypeptides of the invention (e.g., gene therapy).

### Example 24

[1037] Biological Effects of Agonists or Antagonists of the Invention

[1038] Astrocyte and Neuronal Assays

[1039] Agonists or antagonists of the invention, expressed in Escherichia coli and purified as described above, can be tested for activity in promoting the survival, neurite outgrowth, or phenotypic differentiation of cortical neuronal cells and for inducing the proliferation of glial fibrillary acidic protein immunopositive cells, astrocytes. The selection of cortical cells for the bioassay is based on the prevalent expression of FGF-1 and FGF-2 in cortical structures and on the previously reported enhancement of cortical neuronal survival resulting from FGF-2 treatment. A thymidine incorporation assay, for example, can be used to elucidate an agonist or antagonist of the invention's activity on these cells.

[1040] Moreover, previous reports describing the biological effects of FGF-2 (basic FGF) on cortical or hippocampal neurons in vitro have demonstrated increases in both neuron survival and neurite outgrowth (Walicke et al., “Fibroblast growth factor promotes survival of dissociated hippocampal neurons and enhances neurite extension.” Proc. Natl. Acad. Sci. USA 83:3012-3016. (1986), assay herein incorporated by reference in its entirety). However, reports from experiments done on PC-12 cells suggest that these two responses are not necessarily synonymous and may depend on not only which FGF is being tested but also on which receptor(s) are expressed on the target cells. Using the primary cortical neuronal culture paradigm, the ability of an agonist or antagonist of the invention to induce neurite outgrowth can be compared to the response achieved with FGF-2 using, for example, a thymidine incorporation assay.

[1041] Fibroblast and Endothelial Cell Assays

[1042] Human lung fibroblasts are obtained from Clonetics (San Diego, Calif.) and maintained in growth media from Clonetics. Dermal microvascular endothelial cells are obtained from Cell Applications (San Diego, Calif.). For proliferation assays, the human lung fibroblasts and dermal microvascular endothelial cells can be cultured at 5,000 cells/well in a 96-well plate for one day in growth medium. The cells are then incubated for one day in 0.1% BSA basal medium. After replacing the medium with fresh 0.1% BSA medium, the cells are incubated with the test proteins for 3 days. Alamar Blue (Alamar Biosciences, Sacramento, Calif.) is added to each well to a final concentration of 10%. The cells are incubated for 4 hr. Cell viability is measured by reading in a CytoFluor fluorescence reader. For the PGE₂ assays, the human lung fibroblasts are cultured at 5,000 cells/well in a 96-well plate for one day. After a medium change to 0.1% BSA basal medium, the cells are incubated with FGF-2 or agonists or antagonists of the invention with or without IL-1α for 24 hours. The supernatants are collected and assayed for PGE₂ by EIA kit (Cayman, Ann Arbor, Mich.). For the IL-6 assays, the human lung fibroblasts are cultured at 5,000 cells/well in a 96-well plate for one day. After a medium change to 0 1% BSA basal medium, the cells are incubated with FGF-2 or with or without agonists or antagonists of the invention IL-1α for 24 hours. The supernatants are collected and assayed for IL-6 by ELISA kit (Endogen, Cambridge, Mass.).

[1043] Human lung fibroblasts are cultured with FGF-2 or agonists or antagonists of the invention for 3 days in basal medium before the addition of Alamar Blue to assess effects on growth of the fibroblasts. FGF-2 should show a stimulation at 10-2500 ng/ml which can be used to compare stimulation with agonists or antagonists of the invention.

[1044] Parkinson Models

[1045] The loss of motor function in Parkinson's disease is attributed to a deficiency of striatal dopamine resulting from the degeneration of the nigrostriatal dopaminergic projection neurons. An animal model for Parkinson's that has been extensively characterized involves the systemic administration of 1-methyl-4 phenyl 1,2,3,6-tetrahydropyridine (MPTP). In the CNS, MPTP is taken-up by astrocytes and catabolized by monoamine oxidase B to 1-methyl-4-phenyl pyridine (MPP⁺) and released. Subsequently, MPP⁺ is actively accumulated in dopaminergic neurons by the high-affinity reuptake transporter for dopamine. MPP⁺ is then concentrated in mitochondria by the electrochemical gradient and selectively inhibits nicotidamide adenine disphosphate: ubiquinone oxidoreductionase (complex I), thereby interfering with electron transport and eventually generating oxygen radicals.

[1046] It has been demonstrated in tissue culture paradigms that FGF-2 (basic FGF) has trophic activity towards nigral dopaminergic neurons (Ferrari et al., Dev. Biol. 1989). Recently, Dr. Unsicker's group has demonstrated that administering FGF-2 in gel foam implants in the striatum results in the near complete protection of nigral dopaminergic neurons from the toxicity associated with MPTP exposure (Otto and Unsicker, J. Neuroscience, 1990).

[1047] Based on the data with FGF-2, agonists or antagonists of the invention can be evaluated to determine whether it has an action similar to that of FGF-2 in enhancing dopaminergic neuronal survival in vitro and it can also be tested in vivo for protection of dopaminergic neurons in the striatum from the damage associated with MPTP treatment. The potential effect of an agonist or antagonist of the invention is first examined in vitro in a dopaminergic neuronal cell culture paradigm. The cultures are prepared by dissecting the midbrain floor plate from gestation day 14 Wistar rat embryos. The tissue is dissociated with trypsin and seeded at a density of 200,000 cells/cm² on polyorthinine-laminin coated glass coverslips. The cells are maintained in Dulbecco's Modified Eagle's medium and F12 medium containing hormonal supplements (N1). The cultures are fixed with paraformaldehyde after 8 days in vitro and are processed for tyrosine hydroxylase, a specific marker for dopminergic neurons, immunohistochemical staining. Dissociated cell cultures are prepared from embryonic rats. The culture medium is changed every third day and the factors are also added at that time.

[1048] Since the dopaminergic neurons are isolated from animals at gestation day 14, a developmental time which is past the stage when the dopaminergic precursor cells are proliferating, an increase in the number of tyrosine hydroxylase immunopositive neurons would represent an increase in the number of dopaminergic neurons surviving in vitro. Therefore, if an agonist or antagonist of the invention acts to prolong the survival of dopaminergic neurons, it would suggest that the agonist or antagonist may be involved in Parkinson's Disease.

[1049] The studies described in this example tested activity of agonists or antagonists of the invention. However, one skilled in the art could easily modify the exemplified studies to test the activity of polynucleotides or polypeptides of the invention (e.g., gene therapy).

### Example 25

[1050] The Effect of Agonists or Antagonists of the Invention on the Growth of Vascular Endothelial Cells

[1051] On day 1, human umbilical vein endothelial cells (HUVEC) are seeded at 2-5×10⁴ cells/35 mm dish density in M199 medium containing 4% fetal bovine serum (FBS), 16 units/ml heparin, and 50 units/ml endothelial cell growth supplements (ECGS, Biotechnique, Inc.). On day 2, the medium is replaced with M199 containing 10% FBS, 8 units/ml heparin. An agonist or antagonist of the invention, and positive controls, such as VEGF and basic FGF (bFGF) are added, at varying concentrations. On days 4 and 6, the medium is replaced. On day 8, cell number is determined with a Coulter Counter.

[1052] An increase in the number of HUVEC cells indicates that the compound of the invention may proliferate vascular endothelial cells, while a decrease in the number of HUVEC cell indicates that the compound of the invention inhibits vascular endothelial cells.

[1053] The studies described in this example tested activity of a polypeptide of the invention. However, one skilled in the art could easily modify the exemplified studies to test the activity of polynucleotides (e.g., gene therapy), agonists, and/or antagonists of the invention.

### Example 26

[1054] Rat Corneal Wound Healing Model

[1055] This animal model shows the effect of an agonist or antagonist of the invention on neovascularization. The experimental protocol includes:

[1056] a) Making a 1-1.5 mm long incision from the center of cornea into the stromal layer.

[1057] b) Inserting a spatula below the lip of the incision facing the outer corner of the eye.

[1058] c) Making a pocket (its base is 1-1.5 mm form the edge of the eye).

[1059] d) Positioning a pellet, containing 50 ng-5 ug of an agonist or antagonist of the invention, within the pocket.

[1060] e) Treatment with an agonist or antagonist of the invention can also be applied topically to the corneal wounds in a dosage range of 20 mg-500 mg (daily treatment for five days).

[1061] The studies described in this example tested activity of agonists or antagonists of the invention. However, one skilled in the art could easily modify the exemplified studies to test the activity of polynucleotides or polypeptides of the invention (e.g., gene therapy).

### Example 27

[1062] Diabetic Mouse and Glucocorticoid-Impaired Wound Healing Models

[1063] A. Diabetic db+/db+ Mouse Model

[1064] To demonstrate that an agonist or antagonist of the invention accelerates the healing process, the genetically diabetic mouse model of wound healing is used. The full thickness wound healing model in the db+/db+ mouse is a well characterized, clinically relevant and reproducible model of impaired wound healing. Healing of the diabetic wound is dependent on formation of granulation tissue and re-epithelialization rather than contraction (Gartner, M. H. et al., J. Surg. Res. 52:389 (1992); Greenhalgh, D. G. et al., Am. J. Pathol. 136:1235 (1990)).

[1065] The diabetic animals have many of the characteristic features observed in Type II diabetes mellitus. Homozygous (db+/db+) mice are obese in comparison to their normal heterozygous (db+/+m) littermates. Mutant diabetic (db+/db+) mice have a single autosomal recessive mutation on chromosome 4 (db+) (Coleman et al. Proc. Natl. Acad. Sci. USA 77:283-293 (1982)). Animals show polyphagia, polydipsia and polyuria. Mutant diabetic mice (db+/db+) have elevated blood glucose, increased or normal insulin levels, and suppressed cell-mediated immunity (Mandel et al., J. Immunol. 120:1375 (1978); Debray-Sachs, M. et al., Clin. Exp. Immunol. 51(1):1-7 (1983); Leiter et al., Am. J. of Pathol. 114:46-55 (1985)). Peripheral neuropathy, myocardial complications, and microvascular lesions, basement membrane thickening and glomerular filtration abnormalities have been described in these animals (Norido, F. et al., Exp. Neurol. 83(2):221-232 (1984); Robertson et al., Diabetes 29(1):60-67 (1980); Giacomelli et al., Lab Invest. 40(4):460-473 (1979); Coleman, D. L., Diabetes 31 (Suppl):1-6 (1982)). These homozygous diabetic mice develop hyperglycemia that is resistant to insulin analogous to human type II diabetes (Mandel et al., J. Immunol. 120:1375-1377 (1978)).

[1066] The characteristics observed in these animals suggests that healing in this model may be similar to the healing observed in human diabetes (Greenhalgh, et al., Am. J. of Pathol. 136:1235-1246 (1990)).

[1067] Genetically diabetic female C57BL/KsJ (db+/db+) mice and their non-diabetic (db+/+m) heterozygous littermates are used in this study (Jackson Laboratories). The animals are purchased at 6 weeks of age and are 8 weeks old at the beginning of the study. Animals are individually housed and received food and water ad libitum. All manipulations are performed using aseptic techniques. The experiments are conducted according to the rules and guidelines of Human Genome Sciences, Inc. Institutional Animal Care and Use Committee and the Guidelines for the Care and Use of Laboratory Animals.

[1068] Wounding protocol is performed according to previously reported methods (Tsuboi, R. and Rifkin, D. B., J. Exp. Med. 172:245-251 (1990)). Briefly, on the day of wounding, animals are anesthetized with an intraperitoneal injection of Avertin (0.01 mg/mL), 2,2,2-tribromoethanol and 2-methyl-2-butanol dissolved in deionized water. The dorsal region of the animal is shaved and the skin washed with 70% ethanol solution and iodine. The surgical area is dried with sterile gauze prior to wounding. An 8 mm full-thickness wound is then created using a Keyes tissue punch. Immediately following wounding, the surrounding skin is gently stretched to eliminate wound expansion. The wounds are left open for the duration of the experiment. Application of the treatment is given topically for 5 consecutive days commencing on the day of wounding. Prior to treatment, wounds are gently cleansed with sterile saline and gauze sponges.

[1069] Wounds are visually examined and photographed at a fixed distance at the day of surgery and at two day intervals thereafter. Wound closure is determined by daily measurement on days 1-5 and on day 8. Wounds are measured horizontally and vertically using a calibrated Jameson caliper. Wounds are considered healed if granulation tissue is no longer visible and the wound is covered by a continuous epithelium.

[1070] An agonist or antagonist of the invention is administered using at a range different doses, from 4 mg to 500 mg per wound per day for 8 days in vehicle. Vehicle control groups received 50 mL of vehicle solution.

[1071] Animals are euthanized on day 8 with an intraperitoneal injection of sodium pentobarbital (300 mg/kg). The wounds and surrounding skin are then harvested for histology and immunohistochemistry. Tissue specimens are placed in 10% neutral buffered formalin in tissue cassettes between biopsy sponges for further processing. Three groups of 10 animals each (5 diabetic and 5 non-diabetic controls) are evaluated: 1) Vehicle placebo control, 2) untreated group, and 3) treated group. Wound closure is analyzed by measuring the area in the vertical and horizontal axis and obtaining the total square area of the wound. Contraction is then estimated by establishing the differences between the initial wound area (day 0) and that of post treatment (day 8). The wound area on day 1 is 64 mm², the corresponding size of the dermal punch. Calculations are made using the following formula:

[Open area on day 8]−[Open area on day 1]/[Open area on day 1]

[1072] Specimens are fixed in 10% buffered formalin and paraffin embedded blocks are sectioned perpendicular to the wound surface (5 mm) and cut using a Reichert-Jung microtome. Routine hematoxylin-eosin (H&E) staining is performed on cross-sections of bisected wounds. Histologic examination of the wounds are used to assess whether the healing process and the morphologic appearance of the repaired skin is altered by treatment with an agonist or antagonist of the invention. This assessment included verification of the presence of cell accumulation, inflammatory cells, capillaries, fibroblasts, re-epithelialization and epidermal maturity (Greenhalgh, D. G. et al., Am. J. Pathol. 136:1235 (1990)). A calibrated lens micrometer is used by a blinded observer.

[1073] Tissue sections are also stained immunohistochemically with a polyclonal rabbit anti-human keratin antibody using ABC Elite detection system. Human skin is used as a positive tissue control while non-immune IgG is used as a negative control. Keratinocyte growth is determined by evaluating the extent of reepithelialization of the wound using a calibrated lens micrometer.

[1074] Proliferating cell nuclear antigen/cyclin (PCNA) in skin specimens is demonstrated by using anti-PCNA antibody (1:50) with an ABC Elite detection system. Human colon cancer served as a positive tissue control and human brain tissue is used as a negative tissue control. Each specimen included a section with omission of the primary antibody and substitution with non-immune mouse IgG. Ranking of these sections is based on the extent of proliferation on a scale of 0-8, the lower side of the scale reflecting slight proliferation to the higher side reflecting intense proliferation.

[1075] Experimental data are analyzed using an unpaired t test. A p value of <0.05 is considered significant.

[1076] B. Steroid Impaired Rat Model

[1077] The inhibition of wound healing by steroids has been well documented in various in vitro and in vivo systems (Wahl, Glucocorticoids and Wound healing. In: Anti-Inflammatory Steroid Action: Basic and Clinical Aspects. 280-302 (1989); Wahlet al., J. Immunol. 115: 476-481 (1975); Werb et al., J. Exp. Med. 147:1684-1694 (1978)). Glucocorticoids retard wound healing by inhibiting angiogenesis, decreasing vascular permeability (Ebert et al., An. Intern. Med. 37:701-705 (1952)), fibroblast proliferation, and collagen synthesis (Beck et al., Growth Factors. 5: 295-304 (1991); Haynes et al., J. Clin. Invest. 61: 703-797 (1978)) and producing a transient reduction of circulating monocytes (Haynes et al., J. Clin. Invest. 61: 703-797 (1978); Wahl, “Glucocorticoids and wound healing”, In: Antiinflammatory Steroid Action: Basic and Clinical Aspects, Academic Press, New York, pp. 280-302 (1989)). The systemic administration of steroids to impaired wound healing is a well establish phenomenon in rats (Beck et al., Growth Factors. 5: 295-304 (1991); Haynes et al., J. Clin. Invest. 61: 703-797 (1978); Wahl, “Glucocorticoids and wound healing”, In: Antiinflammatory Steroid Action: Basic and Clinical Aspects, Academic Press, New York, pp. 280-302 (1989); Pierce et al., Proc. Natl. Acad. Sci. USA 86: 2229-2233 (1989)).

[1078] To demonstrate that an agonist or antagonist of the invention can accelerate the healing process, the effects of multiple topical applications of the agonist or antagonist on full thickness excisional skin wounds in rats in which healing has been impaired by the systemic administration of methylprednisolone is assessed.

[1079] Young adult male Sprague Dawley rats weighing 250-300 g (Charles River Laboratories) are used in this example. The animals are purchased at 8 weeks of age and are 9 weeks old at the beginning of the study. The healing response of rats is impaired by the systemic administration of methylprednisolone (17 mg/kg/rat intramuscularly) at the time of wounding. Animals are individually housed and received food and water ad libitum. All manipulations are performed using aseptic techniques. This study is conducted according to the rules and guidelines of Human Genome Sciences, Inc. Institutional Animal Care and Use Committee and the Guidelines for the Care and Use of Laboratory Animals.

[1080] The wounding protocol is followed according to section A, above. On the day of wounding, animals are anesthetized with an intramuscular injection of ketamine (50 mg/kg) and xylazine (5 mg/kg). The dorsal region of the animal is shaved and the skin washed with 70% ethanol and iodine solutions. The surgical area is dried with sterile gauze prior to wounding. An 8 mm full-thickness wound is created using a Keyes tissue punch. The wounds are left open for the duration of the experiment. Applications of the testing materials are given topically once a day for 7 consecutive days commencing on the day of wounding and subsequent to methylprednisolone administration. Prior to treatment, wounds are gently cleansed with sterile saline and gauze sponges.

[1081] Wounds are visually examined and photographed at a fixed distance at the day of wounding and at the end of treatment. Wound closure is determined by daily measurement on days 1-5 and on day 8. Wounds are measured horizontally and vertically using a calibrated Jameson caliper. Wounds are considered healed if granulation tissue is no longer visible and the wound is covered by a continuous epithelium.

[1082] The agonist or antagonist of the invention is administered using at a range different doses, from 4 mg to 500 mg per wound per day for 8 days in vehicle. Vehicle control groups received 50 mL of vehicle solution.

[1083] Animals are euthanized on day 8 with an intraperitoneal injection of sodium pentobarbital (300 mg/kg). The wounds and surrounding skin are then harvested for histology. Tissue specimens are placed in 10% neutral buffered formalin in tissue cassettes between biopsy sponges for further processing.

[1084] Four groups of 10 animals each (5 with methylprednisolone and 5 without glucocorticoid) are evaluated: 1) Untreated group 2) Vehicle placebo control 3) treated groups.

[1085] Wound closure is analyzed by measuring the area in the vertical and horizontal axis and obtaining the total area of the wound. Closure is then estimated by establishing the differences between the initial wound area (day 0) and that of post treatment (day 8). The wound area on day 1 is 64 mm², the corresponding size of the dermal punch. Calculations are made using the following formula:

[Open area on day 8]−[Open area on day 1]/[Open area on day 1]

[1086] Specimens are fixed in 10% buffered formalin and paraffin embedded blocks are sectioned perpendicular to the wound surface (5 mm) and cut using an Olympus microtome. Routine hematoxylin-eosin (H&E) staining is performed on cross-sections of bisected wounds. Histologic examination of the wounds allows assessment of whether the healing process and the morphologic appearance of the repaired skin is improved by treatment with an agonist or antagonist of the invention. A calibrated lens micrometer is used by a blinded observer to determine the distance of the wound gap.

[1087] Experimental data are analyzed using an unpaired t test. A p value of <0.05 is considered significant

[1088] The studies described in this example tested activity of agonists or antagonists of the invention. However, one skilled in the art could easily modify the exemplified studies to test the activity of polynucleotides or polypeptides of the invention (e.g., gene therapy).

### Example 28

[1089] Lymphadema Animal Model

[1090] The purpose of this experimental approach is to create an appropriate and consistent lymphedema model for testing the therapeutic effects of an agonist or antagonist of the invention in lymphangiogenesis and re-establishment of the lymphatic circulatory system in the rat hind limb. Effectiveness is measured by swelling volume of the affected limb, quantification of the amount of lymphatic vasculature, total blood plasma protein, and histopathology. Acute lymphedema is observed for 7-10 days. Perhaps more importantly, the chronic progress of the edema is followed for up to 3-4 weeks.

[1091] Prior to beginning surgery, blood sample is drawn for protein concentration analysis. Male rats weighing approximately ˜350 g are dosed with Pentobarbital. Subsequently, the right legs are shaved from knee to hip. The shaved area is swabbed with gauze soaked in 70% EtOH. Blood is drawn for serum total protein testing. Circumference and volumetric measurements are made prior to injecting dye into paws after marking 2 measurement levels (0.5 cm above heel, at mid-pt of dorsal paw). The intradermal dorsum of both right and left paws are injected with 0.05 ml of 1% Evan's Blue. Circumference and volumetric measurements are then made following injection of dye into paws.

[1092] Using the knee joint as a landmark, a mid-leg inguinal incision is made circumferentially allowing the femoral vessels to be located. Forceps and hemostats are used to dissect and separate the skin flaps. After locating the femoral vessels, the lymphatic vessel that runs along side and underneath the vessel(s) is located. The main lymphatic vessels in this area are then electrically coagulated or suture ligated.

[1093] Using a microscope, muscles in back of the leg (near the semitendinosis and adductors) are bluntly dissected. The popliteal lymph node is then located. The 2 proximal and 2 distal lymphatic vessels and distal blood supply of the popliteal node are then and ligated by suturing. The popliteal lymph node, and any accompanying adipose tissue, is then removed by cutting connective tissues.

[1094] Care is taken to control any mild bleeding resulting from this procedure. After lymphatics are occluded, the skin flaps are sealed by using liquid skin (Vetbond) (AJ Buck). The separated skin edges are sealed to the underlying muscle tissue while leaving a gap of ˜0.5 cm around the leg. Skin also may be anchored by suturing to underlying muscle when necessary.

[1095] To avoid infection, animals are housed individually with mesh (no bedding). Recovering animals are checked daily through the optimal edematous peak, which typically occurred by day 5-7. The plateau edematous peak are then observed. To evaluate the intensity of the lymphedema, the circumference and volumes of 2 designated places on each paw before operation and daily for 7 days are measured. The effect plasma proteins on lymphedema is determined and whether protein analysis is a useful testing perimeter is also investigated. The weights of both control and edematous limbs are evaluated at 2 places. Analysis is performed in a blind manner.

[1096] Circumference Measurements: Under brief gas anesthetic to prevent limb movement, a cloth tape is used to measure limb circumference. Measurements are done at the ankle bone and dorsal paw by 2 different people then those 2 readings are averaged. Readings are taken from both control and edematous limbs.

[1097] Volumetric Measurements: On the day of surgery, animals are anesthetized with Pentobarbital and are tested prior to surgery. For daily volumetrics animals are under brief halothane anesthetic (rapid immobilization and quick recovery), both legs are shaved and equally marked using waterproof marker on legs. Legs are first dipped in water, then dipped into instrument to each marked level then measured by Buxco edema software(Chen/Victor). Data is recorded by one person, while the other is dipping the limb to marked area.

[1098] Blood-plasma protein measurements: Blood is drawn, spun, and serum separated prior to surgery and then at conclusion for total protein and Ca2+0 comparison.

[1099] Limb Weight Comparison: After drawing blood, the animal is prepared for tissue collection. The limbs are amputated using a quillitine, then both experimental and control legs are cut at the ligature and weighed. A second weighing is done as the tibio-cacaneal joint is disarticulated and the foot is weighed.

[1100] Histological Preparations: The transverse muscle located behind the knee (popliteal) area is dissected and arranged in a metal mold, filled with freezeGel, dipped into cold methylbutane, placed into labeled sample bags at −80EC until sectioning. Upon sectioning, the muscle is observed under fluorescent microscopy for lymphatics.

[1101] The studies described in this example tested activity of agonists or antagonists of the invention. However, one skilled in the art could easily modify the exemplified studies to test the activity of polynucleotides or polypeptides of the invention (e.g., gene therapy).

### Example 29

[1102] Suppression of TNF Alpha-induced Adhesion Molecule Expression by a Agonist or Antagonist of the Invention

[1103] The recruitment of lymphocytes to areas of inflammation and angiogenesis involves specific receptor-ligand interactions between cell surface adhesion molecules (CAMs) on lymphocytes and the vascular endothelium. The adhesion process, in both normal and pathological settings, follows a multi-step cascade that involves intercellular adhesion molecule-1 (ICAM-1), vascular cell adhesion molecule-1 (VCAM-1), and endothelial leukocyte adhesion molecule-1 (E-selectin) expression on endothelial cells (EC). The expression of these molecules and others on the vascular endothelium determines the efficiency with which leukocytes may adhere to the local vasculature and extravasate into the local tissue during the development of an inflammatory response. The local concentration of cytokines and growth factor participate in the modulation of the expression of these CAMs.

[1104] Tumor necrosis factor alpha (TNF-a), a potent proinflammatory cytokine, is a stimulator of all three CAMs on endothelial cells and may be involved in a wide variety of inflammatory responses, often resulting in a pathological outcome.

[1105] The potential of an agonist or antagonist of the invention to mediate a suppression of TNF-a induced CAM expression can be examined. A modified ELISA assay which uses ECs as a solid phase absorbent is employed to measure the amount of CAM expression on TNF-a treated ECs when co-stimulated with a member of the FGF family of proteins.

[1106] To perform the experiment, human umbilical vein endothelial cell (HUVEC) cultures are obtained from pooled cord harvests and maintained in growth medium (EGM-2; Clonetics, San Diego, Calif.) supplemented with 10% FCS and 1% penicillin/streptomycin in a 37 degree C. humidified incubator containing 5% CO₂. HUVECs are seeded in 96-well plates at concentrations of 1×10⁴ cells/well in EGM medium at 37 degree C. for 18-24 hrs or until confluent. The monolayers are subsequently washed 3 times with a serum-free solution of RPMI-1640 supplemented with 100 U/ml penicillin and 100 mg/ml streptomycin, and treated with a given cytokine and/or growth factor(s) for 24 h at 37 degree C. Following incubation, the cells are then evaluated for CAM expression.

[1107] Human Umbilical Vein Endothelial cells (HUVECs) are grown in a standard 96 well plate to confluence. Growth medium is removed from the cells and replaced with 90 ul of 199 Medium (10% FBS). Samples for testing and positive or negative controls are added to the plate in triplicate (in 10 ul volumes). Plates are incubated at 37 degree C. for either 5 h (selectin and integrin expression) or 24 h (integrin expression only). Plates are aspirated to remove medium and 100 μl of 0.1% paraformaldehyde-PBS(with Ca++ and Mg++) is added to each well. Plates are held at 4° C. for 30 min.

[1108] Fixative is then removed from the wells and wells are washed 1× with PBS(+Ca,Mg)+0.5% BSA and drained. Do not allow the wells to dry. Add 10 μl of diluted primary antibody to the test and control wells. Anti-ICAM-1-Biotin, Anti-VCAM-1-Biotin and Anti-E-selectin-Biotin are used at a concentration of 10 μg/ml (1:10 dilution of 0.1 mg/ml stock antibody). Cells are incubated at 37° C. for 30 min. in a humidified environment. Wells are washed ×3 with PBS(+Ca,Mg)+0.5% BSA.

[1109] Then add 20 μl of diluted ExtrAvidin-Alkaline Phosphotase (1:5,000 dilution) to each well and incubated at 37° C. for 30 min. Wells are washed ×3 with PBS(+Ca,Mg)+0.5% BSA. 1 tablet of p-Nitrophenol Phosphate pNPP is dissolved in 5 ml of glycine buffer (pH 10.4). 100 μl of pNPP substrate in glycine buffer is added to each test well. Standard wells in triplicate are prepared from the working dilution of the ExtrAvidin-Alkaline Phosphotase in glycine buffer: 1:5,000 (10⁰)>10^{-0.5}>10⁻¹>10^{-1.5}0.5 μl of each dilution is added to triplicate wells and the resulting AP content in each well is 5.50 ng, 1.74 ng, 0.55 ng, 0.18 ng. 100 μl of pNNP reagent must then be added to each of the standard wells. The plate must be incubated at 37° C. for 4 h. A volume of 50 μl of 3M NaOH is added to all wells. The results are quantified on a plate reader at 405 nm. The background subtraction option is used on blank wells filled with glycine buffer only. The template is set up to indicate the concentration of AP-conjugate in each standard well [5.50 ng; 1.74 ng; 0.55 ng; 0.18 ng]. Results are indicated as amount of bound AP-conjugate in each sample.

[1110] The studies described in this example tested activity of agonists or antagonists of the invention. However, one skilled in the art could easily modify the exemplified studies to test the activity of polynucleotides or polypeptides of the invention (e.g., gene therapy).

### Example 30

[1111] Production Of Polypeptide of the Invention For High-Throughput Screening Assays

[1112] The following protocol produces a supernatant containing polypeptide of the present invention to be tested. This supernatant can then be used in the Screening Assays described in Examples 32-41.

[1113] First, dilute Poly-D-Lysine (644 587 Boehringer-Mannheim) stock solution 1 mg/ml in PBS) 1:20 in PBS (w/o calcium or magnesium 17-516F Biowhittaker) for a working solution of 50 ug/ml. Add 200 ul of this solution to each well (24 well plates) and incubate at RT for 20 minutes. Be sure to distribute the solution over each well (note: a 12-channel pipetter may be used with tips on every other channel). Aspirate off the Poly-D-Lysine solution and rinse with 1 ml PBS (Phosphate Buffered Saline). The PBS should remain in the well until just prior to plating the cells and plates may be poly-lysine coated in advance for up to two weeks.

[1114] Plate 293T cells (do not carry cells past P+20) at 2×10⁵ cells/well in 0.5 ml DMEM(Dulbecco's Modified Eagle Medium)(with 4.5 G/L glucose and L-glutamine (12-604F Biowhittaker))/10% heat inactivated FBS(14-503F Biowhittaker)/1×Penstrep(17-602E Biowhittaker). Let the cells grow overnight.

[1115] The next day, mix together in a sterile solution basin: 300 ul Lipofectamine (18324-012 Gibco/BRL) and 5 ml Optimem I (31985070 Gibco/BRL)/96-well plate. With a small volume multi-channel pipetter, aliquot approximately 2 ug of an expression vector containing a polynucleotide insert, produced by the methods described in Examples 8-10, into an appropriately labeled 96-well round bottom plate. With a multi-channel pipetter, add 50 ul of the Lipofectamine/Optimem I mixture to each well. Pipette up and down gently to mix. Incubate at RT 15-45 minutes. After about 20 minutes, use a multi-channel pipetter to add 150 ul Optimem I to each well. As a control, one plate of vector DNA lacking an insert should be transfected with each set of transfections.

[1116] Preferably, the transfection should be performed by tag-teaming the following tasks. By tag-teaming, hands on time is cut in half, and the cells do not spend too much time on PBS. First, person A aspirates off the media from four 24-well plates of cells, and then person B rinses each well with 0.5-1 ml PBS. Person A then aspirates off PBS rinse, and person B, using a12-channel pipetter with tips on every other channel, adds the 200 ul of DNA/Lipofectamine/Optimem I complex to the odd wells first, then to the even wells, to each row on the 24-well plates. Incubate at 37 degree C. for 6 hours.

[1117] While cells are incubating, prepare appropriate media, either 1%BSA in DMEM with 1×penstrep, or HGS CHO-5 media (116.6 mg/L of CaCl2 (anhyd); 0.00130 mg/L CuSO₄-5H₂O; 0.050 mg/L of Fe(NO₃)₃-9H₂O; 0.417 mg/L of FeSO₄-7H₂O; 311.80 mg/L of Kcl; 28.64 mg/L of MgCl₂; 48.84 mg/L of MgSO₄; 6995.50 mg/L of NaCl; 2400.0 mg/L of NaHCO₃; 62.50 mg/L of NaH₂PO₄-H₂O; 71.02 mg/L of Na₂HPO4; 0.4320 mg/L of ZnSO₄-7H₂O; 0.002 mg/L of Arachidonic Acid; 1.022 mg/L of Cholesterol; 0.070 mg/L of DL-alpha-Tocopherol-Acetate; 0.0520 mg/L of Linoleic Acid; 0.010 mg/L of Linolenic Acid; 0.010 mg/L of Myristic Acid; 0.010 mg/L of Oleic Acid; 0.010 mg/L of Palmitric Acid; 0.010 mg/L of Palmitic Acid; 100 mg/L of Pluronic F-68; 0.010 mg/L of Stearic Acid; 2.20 mg/L of Tween 80; 4551 mg/L of D-Glucose; 130.85 mg/ml of L-Alanine; 147.50 mg/ml of L-Arginine-HCL; 7.50 mg/ml of L-Asparagine-H₂O; 6.65 mg/ml of L-Aspartic Acid; 29.56 mg/ml of L-Cystine-2HCL-H₂O; 31.29 mg/ml of L-Cystine-2HCL; 7.35 mg/ml of L-Glutamic Acid; 365.0 mg/ml of L-Glutamine; 18.75 mg/ml of Glycine; 52.48 mg/ml of L-Histidine-HCL-H₂O; 106.97 mg/ml of L-Isoleucine; 111.45 mg/ml of L-Leucine; 163.75 mg/ml of L-Lysine HCL; 32.34 mg/ml of L-Methionine; 68.48 mg/ml of L-Phenylalainine; 40.0 mg/ml of L-Proline; 26.25 mg/ml of L-Serine; 101.05 mg/ml of L-Threonine; 19.22 mg/ml of L-Tryptophan; 91.79 mg/ml of L-Tryrosine-2Na-2H₂O; and 99.65 mg/ml of L-Valine; 0.0035 mg/L of Biotin; 3.24 mg/L of D-Ca Pantothenate; 11.78 mg/L of Choline Chloride; 4.65 mg/L of Folic Acid; 15.60 mg/L of i-Inositol; 3.02 mg/L of Niacinamide; 3.00 mg/L of Pyridoxal HCL; 0.031 mg/L of Pyridoxine HCL; 0.319 mg/L of Riboflavin; 3.17 mg/L of Thiamine HCL; 0.365 mg/L of Thymidine; 0.680 mg/L of Vitamin B₁₂; 25 mM of HEPES Buffer; 2.39 mg/L of Na Hypoxanthine; 0.105 mg/L of Lipoic Acid; 0.081 mg/L of Sodium Putrescine-2HCL; 55.0 mg/L of Sodium Pyruvate; 0.0067 mg/L of Sodium Selenite; 20 uM of Ethanolamine; 0.122 mg/L of Ferric Citrate; 41.70 mg/L of Methyl-B-Cyclodextrin complexed with Linoleic Acid; 33.33 mg/L of Methyl-B-Cyclodextrin complexed with Oleic Acid; 10 mg/L of Methyl-B-Cyclodextrin complexed with Retinal Acetate. Adjust osmolarity to 327 mOsm) with 2 mm glutamine and 1×penstrep. (BSA (81-068-3 Bayer) 100 gm dissolved in 1 L DMEM for a 10% BSA stock solution). Filter the media and collect 50 ul for endotoxin assay in 15 ml polystyrene conical.

[1118] The transfection reaction is terminated, preferably by tag-teaming, at the end of the incubation period. Person A aspirates off the transfection media, while person B adds 1.5 ml appropriate media to each well. Incubate at 37 degree C. for 45 or 72 hours depending on the media used: 1%BSA for 45 hours or CHO-5 for 72 hours.

[1119] On day four, using a 300 ul multichannel pipetter, aliquot 600 ul in one 1 ml deep well plate and the remaining supernatant into a 2 ml deep well. The supernatants from each well can then be used in the assays described in Examples 32-39.

[1120] It is specifically understood that when activity is obtained in any of the assays described below using a supernatant, the activity originates from either the polypeptide of the present invention directly (e.g., as a secreted protein) or by polypeptide of the present invention inducing expression of other proteins, which are then secreted into the supernatant. Thus, the invention further provides a method of identifying the protein in the supernatant characterized by an activity in a particular assay.

### Example 31

[1121] Construction of GAS Reporter Construct

[1122] One signal transduction pathway involved in the differentiation and proliferation of cells is called the Jaks-STATs pathway. Activated proteins in the Jaks-STATs pathway bind to gamma activation site “GAS” elements or interferon-sensitive responsive element (“ISRE”), located in the promoter of many genes. The binding of a protein to these elements alter the expression of the associated gene.

[1123] GAS and ISRE elements are recognized by a class of transcription factors called Signal Transducers and Activators of Transcription, or “STATs.” There are six members of the STATs family. Stat1 and Stat3 are present in many cell types, as is Stat2 (as response to IFN-alpha is widespread). Stat4 is more restricted and is not in many cell types though it has been found in T helper class I, cells after treatment with IL-12. Stat5 was originally called mammary growth factor, but has been found at higher concentrations in other cells including myeloid cells. It can be activated in tissue culture cells by many cytokines.

[1124] The STATs are activated to translocate from the cytoplasm to the nucleus upon tyrosine phosphorylation by a set of kinases known as the Janus Kinase (“Jaks”) family. Jaks represent a distinct family of soluble tyrosine kinases and include Tyk2, Jak1, Jak2, and Jak3. These kinases display significant sequence similarity and are generally catalytically inactive in resting cells.

[1125] The Jaks are activated by a wide range of receptors summarized in the Table below. (Adapted from review by Schidler and Darnell, Ann. Rev. Biochem. 64:621-51 (1995).) A cytokine receptor family, capable of activating Jaks, is divided into two groups: (a) Class 1 includes receptors for IL-2, IL-3, IL-4, IL-6, IL-7, IL-9, IL-11, IL-12, IL-15, Epo, PRL, GH, G-CSF, GM-CSF, LIF, CNTF, and thrombopoietin; and (b) Class 2 includes IFN-a, IFN-g, and IL-10. The Class 1 receptors share a conserved cysteine motif (a set of four conserved cysteines and one tryptophan) and a WSXWS motif (a membrane proximal region encoding Trp-Ser-Xxx-Trp-Ser (SEQ ID NO:1882)).

[1126] Thus, on binding of a ligand to a receptor, Jaks are activated, which in turn activate STATs, which then translocate and bind to GAS elements. This entire process is encompassed in the Jaks-STATs signal transduction pathway.

[1127] Therefore, activation of the Jaks-STATs pathway, reflected by the binding of the GAS or the ISRE element, can be used to indicate proteins involved in the proliferation and differentiation of cells. For example, growth factors and cytokines are known to activate the Jaks-STATs pathway. (See Table below.) Thus, by using GAS elements linked to reporter molecules, activators of the Jaks-STATs pathway can be identified.

| | JAKs | | | | | |
|---|---|---|---|---|---|---|
| Ligand | tyk2 | Jak1 | Jak2 | Jak3 | STATS | GAS (elements) or ISRE |
| IFN family | | | | | | |
| IFN-a/B | + | + | − | − | 1, 2, 3 | ISRE |
| IFN-g | | + | + | − | 1 | GAS (IRF1 > Lys6 > IFP) |
| Il-10 | + | ? | ? | − | 1, 3 | |
| gp130 family | | | | | | |
| IL-6 (Pleiotrohic) | + | + | + | ? | 1, 3 | GAS (IRF1 > Lys6 > IFP) |
| Il-11 (Pleiotrohic) | ? | + | ? | ? | 1, 3 | |
| OnM (Pleiotrohic) | ? | + | + | ? | 1, 3 | |
| LIF (Pleiotrohic) | ? | + | + | ? | 1, 3 | |
| CNTF (Pleiotrohic) | −/+ | + | + | ? | 1, 3 | |
| G-CSF (Pleiotrohic) | ? | + | ? | ? | 1, 3 | |
| IL-12 (Pleiotrohic) | + | − | + | + | 1, 3 | |
| g-C family | | | | | | |
| IL-2 (lymphocytes) | − | + | − | + | 1, 3, 5 | GAS |
| IL-4 (lymph/myeloid) | − | + | − | + | 6 | GAS (IRF1 = IFP |
| | | | | | | >> Ly6)(IgH) |
| IL-7 (lymphocytes) | − | + | − | + | 5 | GAS |
| IL-9 (lymphocytes) | − | + | − | + | 5 | GAS |
| IL-13 (lymphocyte) | − | + | ? | ? | 6 | GAS |
| IL-15 | ? | + | ? | + | 5 | GAS |
| gp140 family | | | | | | |
| IL-3 (myeloid) | − | − | + | − | 5 | GAS (IRF1 > IFP > Ly6) |
| IL-5 (myeloid) | − | − | + | − | 5 | GAS |
| GM-CSF (myeloid) | − | − | + | − | 5 | GAS |
| Growth hormone family | | | | | | |
| GH | ? | − | + | − | 5 | |
| PRL | ? | +/− | + | − | 1, 3, 5 | |
| EPO | ? | − | + | − | 5 | GAS(B− |
| CAS > IRF1 = IFP >> Ly6) | | | | | | |
| Receptor Tyrosine Kinases | | | | | | |
| EGF | ? | + | + | − | 1, 3 | GAS (IRF1) |
| PDGF | ? | + | + | − | 1, 3 | |
| CSF-1 | ? | + | + | − | 1, 3 | GAS (not IRF1) |

[1128] To construct a synthetic GAS containing promoter element, which is used in the Biological Assays described in Examples 32-33, a PCR based strategy is employed to generate a GAS-SV40 promoter sequence. The 5′ primer contains four tandem copies of the GAS binding site found in the IRF1 promoter and previously demonstrated to bind STATs upon induction with a range of cytokines (Rothman et al., Immunity 1:457-468 (1994).), although other GAS or ISRE elements can be used instead. The 5′ primer also contains 18 bp of sequence complementary to the SV40 early promoter sequence and is flanked with an XhoI site. The sequence of the 5′ primer is:

5′:GCGCCTCGAGATTTCCCCGAAATCTAGATTTCCCCGAAATGATTTCCCCGAA (SEQ ID NO: 1883).
ATGATTTCCCCGAAATATCTGCCATCTCAATTAG:3′

[1129] The downstream primer is complementary to the SV40 promoter and is flanked with a Hind III site: 5′:GCGGCAAGCTTTTTGCAAAGCCTAGGC:3′ (SEQ ID NO:1884).

[1130] PCR amplification is performed using the SV40 promoter template present in the B-gal:promoter plasmid obtained from Clontech. The resulting PCR fragment is digested with XhoI/Hind III and subcloned into BLSK2-. (Stratagene.) Sequencing with forward and reverse primers confirms that the insert contains the following sequence:

5′:CTCGAGATTTCCCCGAAATCTAGATTTCCCCGAAATGATTTCCCCGAAATGA (SEQ ID NO: 1885).
TTTCCCCGAAATATCTGCCATCTCAATTAGTCAGCAACCATAGTCCCGCCCCTA
ACTCCGCCCATCCCGCCCCTAACTCCGCCCAGTTCCGCCCATTCTCCGCCCCAT
GGCTGACTAATTTTTTTTATTTATGCAGAGGCCGAGGCCGCCTCGGCCTCTGAG
CTATTCCAGAAGTAGTGAGGAGGCTTTTTTGGAGGCCTAGGCTTTTGCAAAAA
GCTT:3′

[1131] With this GAS promoter element linked to the SV40 promoter, a GAS:SEAP2 reporter construct is next engineered. Here, the reporter molecule is a secreted alkaline phosphatase, or “SEAP.” Clearly, however, any reporter molecule can be instead of SEAP, in this or in any of the other Examples. Well known reporter molecules that can be used instead of SEAP include chloramphenicol acetyltransferase (CAT), luciferase, alkaline phosphatase, B-galactosidase, green fluorescent protein (GFP), or any protein detectable by an antibody.

[1132] The above sequence confirmed synthetic GAS-SV40 promoter element is subcloned into the pSEAP-Promoter vector obtained from Clontech using HindIII and XhoI, effectively replacing the SV40 promoter with the amplified GAS:SV40 promoter element, to create the GAS-SEAP vector. However, this vector does not contain a neomycin resistance gene, and therefore, is not preferred for mammalian expression systems.

[1133] Thus, in order to generate mammalian stable cell lines expressing the GAS-SEAP reporter, the GAS-SEAP cassette is removed from the GAS-SEAP vector using SalI and NotI, and inserted into a backbone vector containing the neomycin resistance gene, such as pGFP-1 (Clontech), using these restriction sites in the multiple cloning site, to create the GAS-SEAP/Neo vector. Once this vector is transfected into mammalian cells, this vector can then be used as a reporter molecule for GAS binding as described in Examples 32-33.

[1134] Other constructs can be made using the above description and replacing GAS with a different promoter sequence. For example, construction of reporter molecules containing NFK-B and EGR promoter sequences are described in Examples 34 and 35. However, many other promoters can be substituted using the protocols described in these Examples. For instance, SRE, IL-2, NFAT, or Osteocalcin promoters can be substituted, alone or in combination (e.g., GAS/NF-KB/EGR, GAS/NF-KB, Il-2/NFAT, or NF-KB/GAS). Similarly, other cell lines can be used to test reporter construct activity, such as HELA (epithelial), HUVEC (endothelial), Reh (B-cell), Saos-2 (osteoblast), HUVAC (aortic), or Cardiomyocyte.

### Example 32

[1135] High-Throughput Screening Assay for T-cell Activity.

[1136] The following protocol is used to assess T-cell activity by identifying factors, and determining whether supemate containing a polypeptide of the invention proliferates and/or differentiates T-cells. T-cell activity is assessed using the GAS/SEAP/Neo construct produced in Example 31. Thus, factors that increase SEAP activity indicate the ability to activate the Jaks-STATS signal transduction pathway. The T-cell used in this assay is Jurkat T-cells (ATCC Accession No. TIB-152), although Molt-3 cells (ATCC Accession No. CRL-1552) and Molt-4 cells (ATCC Accession No. CRL-1582) cells can also be used.

[1137] Jurkat T-cells are lymphoblastic CD4+ Th1 helper cells. In order to generate stable cell lines, approximately 2 million Jurkat cells are transfected with the GAS-SEAP/neo vector using DMRIE-C (Life Technologies)(transfection procedure described below). The transfected cells are seeded to a density of approximately 20,000 cells per well and transfectants resistant to 1 mg/ml genticin selected. Resistant colonies are expanded and then tested for their response to increasing concentrations of interferon gamma. The dose response of a selected clone is demonstrated.

[1138] Specifically, the following protocol will yield sufficient cells for 75 wells containing 200 ul of cells. Thus, it is either scaled up, or performed in multiple to generate sufficient cells for multiple 96 well plates. Jurkat cells are maintained in RPMI+10% serum with 1%Pen-Strep. Combine 2.5 mls of OPTI-MEM (Life Technologies) with 10 ug of plasmid DNA in a T25 flask. Add 2.5 ml OPTI-MEM containing 50 ul of DMRIE-C and incubate at room temperature for 15-45 mins.

[1139] During the incubation period, count cell concentration, spin down the required number of cells (10⁷ per transfection), and resuspend in OPTI-MEM to a final concentration of 10⁷ cells/ml. Then add 1 ml of 1×10⁷ cells in OPTI-MEM to T25 flask and incubate at 37 degree C. for 6 hrs. After the incubation, add 10 ml of RPMI+15% serum.

[1140] The Jurkat:GAS-SEAP stable reporter lines are maintained in RPMI+10% serum, 1 mg/ml Genticin, and 1% Pen-Strep. These cells are treated with supernatants containing polypeptide of the present invention or polypeptide of the present invention induced polypeptides as produced by the protocol described in Example 30.

[1141] On the day of treatment with the supernatant, the cells should be washed and resuspended in fresh RPMI+10% serum to a density of 500,000 cells per ml. The exact number of cells required will depend on the number of supernatants being screened. For one 96 well plate, approximately 10 million cells (for 10 plates, 100 million cells) are required.

[1142] Transfer the cells to a triangular reservoir boat, in order to dispense the cells into a 96 well dish, using a 12 channel pipette. Using a 12 channel pipette, transfer 200 ul of cells into each well (therefore adding 100,000 cells per well).

[1143] After all the plates have been seeded, 50 ul of the supernatants are transferred directly from the 96 well plate containing the supernatants into each well using a 12 channel pipette. In addition, a dose of exogenous interferon gamma (0.1, 1.0, 10 ng) is added to wells H9, H10, and H11 to serve as additional positive controls for the assay.

[1144] The 96 well dishes containing Jurkat cells treated with supernatants are placed in an incubator for 48 hrs (note: this time is variable between 48-72 hrs). 35 ul samples from each well are then transferred to an opaque 96 well plate using a 12 channel pipette. The opaque plates should be covered (using sellophene covers) and stored at −20 degree C. until SEAP assays are performed according to Example 36. The plates containing the remaining treated cells are placed at 4 degree C. and serve as a source of material for repeating the assay on a specific well if desired.

[1145] As a positive control, 100 Unit/ml interferon gamma can be used which is known to activate Jurkat T cells. Over 30 fold induction is typically observed in the positive control wells.

[1146] The above protocol may be used in the generation of both transient, as well as, stable transfected cells, which would be apparent to those of skill in the art.

### Example 33

[1147] High-Throughput Screening Assay Identifying Myeloid Activity

[1148] The following protocol is used to assess myeloid activity of polypeptide of the present invention by determining whether polypeptide of the present invention proliferates and/or differentiates myeloid cells. Myeloid cell activity is assessed using the GAS/SEAP/Neo construct produced in Example 31. Thus, factors that increase SEAP activity indicate the ability to activate the Jaks-STATS signal transduction pathway. The myeloid cell used in this assay is U937, a pre-monocyte cell line, although TF-1, HL60, or KG1 can be used.

[1149] To transiently transfect U937 cells with the GAS/SEAP/Neo construct produced in Example 31, a DEAE-Dextran method (Kharbanda et. al., 1994, Cell Growth & Differentiation, 5:259-265) is used. First, harvest 2×10e⁷ U937 cells and wash with PBS. The U937 cells are usually grown in RPMI 1640 medium containing 10% heat-inactivated fetal bovine serum (FBS) supplemented with 100 units/ml penicillin and 100 mg/ml streptomycin.

[1150] Next, suspend the cells in 1 ml of 20 mM Tris-HCl (pH 7.4) buffer containing 0.5 mg/ml DEAE-Dextran, 8 ug GAS-SEAP2 plasmid DNA, 140 mM NaCl, 5 mM KCl, 375 uM Na₂HPO₄.7H₂O, 1 mM MgCl₂, and 675 uM CaCl₂. Incubate at 37 degrees C. for 45 min.

[1151] Wash the cells with RPMI 1640 medium containing 10% FBS and then resuspend in 10 ml complete medium and incubate at 37 degree C. for 36 hr.

[1152] The GAS-SEAP/U937 stable cells are obtained by growing the cells in 400 ug/ml G418. The G418-free medium is used for routine growth but every one to two months, the cells should be re-grown in 400 ug/ml G418 for couple of passages.

[1153] These cells are tested by harvesting 1×10⁸ cells (this is enough for ten 96-well plates assay) and wash with PBS. Suspend the cells in 200 ml above described growth medium, with a final density of 5×10⁵ cells/ml. Plate 200 ul cells per well in the 96-well plate (or 1×10⁵ cells/well).

[1154] Add 50 ul of the supernatant prepared by the protocol described in Example 30. Incubate at 37 degee C. for 48 to 72 hr. As a positive control, 100 Unit/ml interferon gamma can be used which is known to activate U937 cells. Over 30 fold induction is typically observed in the positive control wells. SEAP assay the supernatant according to the protocol described in Example 36.

### Example 34

[1155] High-Throughput Screening Assay Identifying Neuronal Activity

[1156] When cells undergo differentiation and proliferation, a group of genes are activated through many different signal transduction pathways. One of these genes, EGRI (early growth response gene 1), is induced in various tissues and cell types upon activation. The promoter of EGRI is responsible for such induction. Using the EGRI promoter linked to reporter molecules, activation of cells can be assessed by polypeptide of the present invention.

[1157] Particularly, the following protocol is used to assess neuronal activity in PC12 cell lines. PC12 cells (rat phenochromocytoma cells) are known to proliferate and/or differentiate by activation with a number of mitogens, such as TPA (tetradecanoyl phorbol acetate), NGF (nerve growth factor), and EGF (epidermal growth factor). The EGRI gene expression is activated during this treatment. Thus, by stably transfecting PC12 cells with a construct containing an EGR promoter linked to SEAP reporter, activation of PC12 cells by polypeptide of the present invention can be assessed.

[1158] The EGR/SEAP reporter construct can be assembled by the following protocol. The EGR-1 promoter sequence (−633 to +1)(Sakamoto K et al., Oncogene 6:867-871 (1991)) can be PCR amplified from human genomic DNA using the following primers:

[1159] 5′ GCGCTCGAGGGATGACAGCGATAGAACCCCGG-3′ (SEQ ID NO: 1886) and

[1160] 5′ GCGAAGCTTCGCGACTCCCCGGATCCGCCTC-3′ (SEQ ID NO: 1887).

[1161] Using the GAS:SEAP/Neo vector produced in Example 31, EGRI amplified product can then be inserted into this vector. Linearize the GAS:SEAP/Neo vector using restriction enzymes XhoI/HindIII, removing the GAS/SV40 stuffer. Restrict the EGRI amplified product with these same enzymes. Ligate the vector and the EGRI promoter.

[1162] To prepare 96 well-plates for cell culture, two mls of a coating solution (1:30 dilution of collagen type I (Upstate Biotech Inc. Cat#08-1 15) in 30% ethanol (filter sterilized)) is added per one 10 cm plate or 50 ml per well of the 96-well plate, and allowed to air dry for 2 hr.

[1163] PC12 cells are routinely grown in RPMI-1640 medium (Bio Whittaker) containing 10% horse serum (JRH BIOSCIENCES, Cat. # 12449-78P), 5% heat-inactivated fetal bovine serum (FBS) supplemented with 100 units/ml penicillin and 100 ug/ml streptomycin on a precoated 10 cm tissue culture dish. One to four split is done every three to four days. Cells are removed from the plates by scraping and resuspended with pipetting up and down for more than 15 times.

[1164] Transfect the EGR/SEAP/Neo construct into PC12 using the Lipofectamine protocol described in Example 30. EGR-SEAP/PC12 stable cells are obtained by growing the cells in 300 ug/ml G418. The G418-free medium is used for routine growth but every one to two months, the cells should be re-grown in 300 ug/ml G418 for couple of passages.

[1165] To assay for neuronal activity, a 10 cm plate with cells around 70 to 80% confluent is screened by removing the old medium. Wash the cells once with PBS (Phosphate buffered saline). Then starve the cells in low serum medium (RPMI-1640 containing 1% horse serum and 0.5% FBS with antibiotics) overnight.

[1166] The next morning, remove the medium and wash the cells with PBS. Scrape off the cells from the plate, suspend the cells well in 2 ml low serum medium. Count the cell number and add more low serum medium to reach final cell density as 5×10⁵ cells/ml.

[1167] Add 200 ul of the cell suspension to each well of 96-well plate (equivalent to 1×10⁵ cells/well). Add 50 ul supernatant produced by Example 30, 37 degree C. for 48 to 72 hr. As a positive control, a growth factor known to activate PC12 cells through EGR can be used, such as 50 ng/ul of Neuronal Growth Factor (NGF). Over fifty-fold induction of SEAP is typically seen in the positive control wells. SEAP assay the supernatant according to Example 36.

### Example 35

[1168] High-Throughput Screening Assay for T-cell Activity

[1169] NF-KB (Nuclear Factor KB) is a transcription factor activated by a wide variety of agents including the inflammatory cytokines IL-1 and TNF, CD30 and CD40, lymphotoxin-alpha and lymphotoxin-beta, by exposure to LPS or thrombin, and by expression of certain viral gene products. As a transcription factor, NF-KB regulates the expression of genes involved in immune cell activation, control of apoptosis (NF-KB appears to shield cells from apoptosis), B and T-cell development, anti-viral and antimicrobial responses, and multiple stress responses.

[1170] In non-stimulated conditions, NF-KB is retained in the cytoplasm with I-KB (Inhibitor KB). However, upon stimulation, I-KB is phosphorylated and degraded, causing NF-KB to shuttle to the nucleus, thereby activating transcription of target genes. Target genes activated by NF-KB include IL-2, IL-6, GM-CSF, ICAM-1 and class 1 MHC.

[1171] Due to its central role and ability to respond to a range of stimuli, reporter constructs utilizing the NF-KB promoter element are used to screen the supernatants produced in Example 30. Activators or inhibitors of NF-KB would be useful in treating, preventing, and/or diagnosing diseases. For example, inhibitors of NF-KB could be used to treat those diseases related to the acute or chronic activation of NF-KB, such as rheumatoid arthritis.

[1172] To construct a vector containing the NF-KB promoter element, a PCR based strategy is employed. The upstream primer contains four tandem copies of the NF-KB binding site (GGGGACTTTCCC) (SEQ ID NO:1888), 18 bp of sequence complementary to the 5′ end of the SV40 early promoter sequence, and is flanked with an XhoI site:

5′:GCGGCCTCGAGGGGACTTTCCCGGGGACTTTCCGGGGACTTTCCGGGACTTT (SEQ ID NO: 1889).
CCATCCTGCCATCTCAATTAG:3′

[1173] The downstream primer is complementary to the 3′ end of the SV40 promoter and is flanked with a Hind III site:

| | |
|---|---|
| 5′:GCGGCAAGCTTTTTGCAAAGCCTAGGC:3′ | (SEQ ID |
| | NO: 1884). |

[1174] PCR amplification is performed using the SV40 promoter template present in the pB-gal:promoter plasmid obtained from Clontech. The resulting PCR fragment is digested with XhoI and Hind III and subcloned into BLSK2-. (Stratagene) Sequencing with the T7 and T3 primers confirms the insert contains the following sequence:

5′:CTCGAGGGGACTTTCCCGGGGACTTTCCGGGGACTTTCCGGGACTTTCCATC (SEQ ID NO: 1890).
TGCCATCTCAATTAGTCAGCAACCATAGTCCCGCCCCTAACTCCGCCCATCCC
GCCCCTAACTCCGCCCAGTTCCGCCCATTCTCCGCCCCATGGCTGACTAATTTT
TTTTATTTATGCAGAGGCCGAGGCCGCCTCGGCCTCTGAGCTATTCCAGAAGT
AGTGAGGAGGCTTTTTTGGAGGCCTAGGCTTTTGCAAAAAGCTT:3′

[1175] Next, replace the SV40 minimal promoter element present in the pSEAP2-promoter plasmid (Clontech) with this NF-KB/SV40 fragment using XhoI and HindIII. However, this vector does not contain a neomycin resistance gene, and therefore, is not preferred for mammalian expression systems.

[1176] In order to generate stable mammalian cell lines, the NF-KB/SV40/SEAP cassette is removed from the above NF-KB/SEAP vector using restriction enzymes SalI and NotI, and inserted into a vector containing neomycin resistance. Particularly, the NF-KB/SV40/SEAP cassette was inserted into pGFP-1 (Clontech), replacing the GFP gene, after restricting pGFP-1 with SalI and NotI.

[1177] Once NF-KB/SV40/SEAP/Neo vector is created, stable Jurkat T-cells are created and maintained according to the protocol described in Example 32. Similarly, the method for assaying supernatants with these stable Jurkat T-cells is also described in Example 32. As a positive control, exogenous TNF alpha (0.1, 1, 10 ng) is added to wells H9, H10, and H11, with a 5-10 fold activation typically observed.

### Example 36

[1178] Assay for SEAP Activity

[1179] As a reporter molecule for the assays described in Examples 32-35, SEAP activity is assayed using the Tropix Phospho-light Kit (Cat. BP-400) according to the following general procedure. The Tropix Phospho-light Kit supplies the Dilution, Assay, and Reaction Buffers used below.

[1180] Prime a dispenser with the 2.5×Dilution Buffer and dispense 15 ul of 2.5×dilution buffer into Optiplates containing 35 ul of a supernatant. Seal the plates with a plastic sealer and incubate at 65 degree C. for 30 min. Separate the Optiplates to avoid uneven heating.

[1181] Cool the samples to room temperature for 15 minutes. Empty the dispenser and prime with the Assay Buffer. Add 50 ml Assay Buffer and incubate at room temperature 5 min. Empty the dispenser and prime with the Reaction Buffer (see the table below). Add 50 ul Reaction Buffer and incubate at room temperature for 20 minutes. Since the intensity of the chemiluminescent signal is time dependent, and it takes about 10 minutes to read 5 plates on luminometer, one should treat 5 plates at each time and start the second set 10 minutes later.

[1182] Read the relative light unit in the luminometer. Set H12 as blank, and print the results. An increase in chemiluminescence indicates reporter activity.

[1183] Reaction Buffer Formulation:

| # of plates | Rxn buffer diluent (ml) | CSPD (ml) |
|---|---|---|
| 10 | 60 | 3 |
| 11 | 65 | 3.25 |
| 12 | 70 | 3.5 |
| 13 | 75 | 3.75 |
| 14 | 80 | 4 |
| 15 | 85 | 4.25 |
| 16 | 90 | 4.5 |
| 17 | 95 | 4.75 |
| 18 | 100 | 5 |
| 19 | 105 | 5.25 |
| 20 | 110 | 5.5 |
| 21 | 115 | 5.75 |
| 22 | 120 | 6 |
| 23 | 125 | 6.25 |
| 24 | 130 | 6.5 |
| 25 | 135 | 6.75 |
| 26 | 140 | 7 |
| 27 | 145 | 7.25 |
| 28 | 150 | 7.5 |
| 29 | 155 | 7.75 |
| 30 | 160 | 8 |
| 31 | 165 | 8.25 |
| 32 | 170 | 8.5 |
| 33 | 175 | 8.75 |
| 34 | 180 | 9 |
| 35 | 185 | 9.25 |
| 36 | 190 | 9.5 |
| 37 | 195 | 9.75 |
| 38 | 200 | 10 |
| 39 | 205 | 10.25 |
| 40 | 210 | 10.5 |
| 41 | 215 | 10.75 |
| 42 | 220 | 11 |
| 43 | 225 | 11.25 |
| 44 | 230 | 11.5 |
| 45 | 235 | 11.75 |
| 46 | 240 | 12 |
| 47 | 245 | 12.25 |
| 48 | 250 | 12.5 |
| 49 | 255 | 12.75 |
| 50 | 260 | 13 |

### Example 37

[1184] High-Throughput Screening Assay Identifying Changes in Small Molecule Concentration and Membrane Permeability

[1185] Binding of a ligand to a receptor is known to alter intracellular levels of small molecules, such as calcium, potassium, sodium, and pH, as well as alter membrane potential. These alterations can be measured in an assay to identify supernatants which bind to receptors of a particular cell. Although the following protocol describes an assay for calcium, this protocol can easily be modified to detect changes in potassium, sodium, pH, membrane potential, or any other small molecule which is detectable by a fluorescent probe.

[1186] The following assay uses Fluorometric Imaging Plate Reader (“FLIPR”) to measure changes in fluorescent molecules (Molecular Probes) that bind small molecules. Clearly, any fluorescent molecule detecting a small molecule can be used instead of the calcium fluorescent molecule, fluo-4 (Molecular Probes, Inc.; catalog no. F-14202), used here.

[1187] For adherent cells, seed the cells at 10,000-20,000 cells/well in a Co-star black 96-well plate with clear bottom. The plate is incubated in a CO₂ incubator for 20 hours. The adherent cells are washed two times in Biotek washer with 200 ul of HBSS (Hank's Balanced Salt Solution) leaving 100 ul of buffer after the final wash.

[1188] A stock solution of 1 mg/ml fluo-4 is made in 10% pluronic acid DMSO. To load the cells with fluo-4 , 50 ul of 12 ug/ml fluo-4 is added to each well. The plate is incubated at 37 degrees C. in a CO₂ incubator for 60 min. The plate is washed four times in the Biotek washer with HBSS leaving 100 ul of buffer.

[1189] For non-adherent cells, the cells are spun down from culture media. Cells are re-suspended to 2-5×10⁶ cells/ml with HBSS in a 50-ml conical tube. 4 ul of 1 mg/ml fluo-4 solution in 10% pluronic acid DMSO is added to each ml of cell suspension. The tube is then placed in a 37 degrees C. water bath for 30-60 min. The cells are washed twice with HBSS, resuspended to 1×10⁶ cells/ml, and dispensed into a microplate, 100 ul/well. The plate is centrifuged at 1000 rpm for 5 min. The plate is then washed once in Denley Cell Wash with 200 ul, followed by an aspiration step to 100 ul final volume.

[1190] For a non-cell based assay, each well contains a fluorescent molecule, such as fluo-4. The supernatant is added to the well, and a change in fluorescence is detected.

[1191] To measure the fluorescence of intracellular calcium, the FLIPR is set for the following parameters: (1) System gain is 300-800 mW; (2) Exposure time is 0.4 second; (3) Camera F/stop is F/2; (4) Excitation is 488 nm; (5) Emission is 530 nm; and (6) Sample addition is 50 ul. Increased emission at 530 nm indicates an extracellular signaling event caused by the a molecule, either polypeptide of the present invention or a molecule induced by polypeptide of the present invention, which has resulted in an increase in the intracellular Ca⁺⁺ concentration.

### Example 38

[1192] High-Throughput Screening Assay Identifying Tyrosine Kinase Activity

[1193] The Protein Tyrosine Kinases (PTK) represent a diverse group of transmembrane and cytoplasmic kinases. Within the Receptor Protein Tyrosine Kinase RPTK) group are receptors for a range of mitogenic and metabolic growth factors including the PDGF, FGF, EGF, NGF, HGF and Insulin receptor subfamilies. In addition there are a large family of RPTKs for which the corresponding ligand is unknown. Ligands for RPTKs include mainly secreted small proteins, but also membrane-bound and extracellular matrix proteins.

[1194] Activation of RPTK by ligands involves ligand-mediated receptor dimerization, resulting in transphosphorylation of the receptor subunits and activation of the cytoplasmic tyrosine kinases. The cytoplasmic tyrosine kinases include receptor associated tyrosine kinases of the src-family (e.g., src, yes, lck, lyn, fyn) and non-receptor linked and cytosolic protein tyrosine kinases, such as the Jak family, members of which mediate signal transduction triggered by the cytokine superfamily of receptors (e.g., the Interleukins, Interferons, GM-CSF, and Leptin).

[1195] Because of the wide range of known factors capable of stimulating tyrosine kinase activity, identifying whether polypeptide of the present invention or a molecule induced by polypeptide of the present invention is capable of activating tyrosine kinase signal transduction pathways is of interest. Therefore, the following protocol is designed to identify such molecules capable of activating the tyrosine kinase signal transduction pathways.

[1196] Seed target cells (e.g., primary keratinocytes) at a density of approximately 25,000 cells per well in a 96 well Loprodyne Silent Screen Plates purchased from Nalge Nunc (Naperville, Ill.). The plates are sterilized with two 30 minute rinses with 100% ethanol, rinsed with water and dried overnight. Some plates are coated for 2 hr with 100 ml of cell culture grade type I collagen (50 mg/ml), gelatin (2%) or polylysine (50 mg/ml), all of which can be purchased from Sigma Chemicals (St. Louis, Mo.) or 10% Matrigel purchased from Becton Dickinson (Bedford, Mass.), or calf serum, rinsed with PBS and stored at 4 degree C. Cell growth on these plates is assayed by seeding 5,000 cells/well in growth medium and indirect quantitation of cell number through use of alamarBlue as described by the manufacturer Alamar Biosciences, Inc. (Sacramento, Calif.) after 48 hr. Falcon plate covers #3071 from Becton Dickinson (Bedford, Mass.) are used to cover the Loprodyne Silent Screen Plates. Falcon Microtest III cell culture plates can also be used in some proliferation experiments.

[1197] To prepare extracts, A431 cells are seeded onto the nylon membranes of Loprodyne plates (20,000/200 ml/well) and cultured overnight in complete medium. Cells are quiesced by incubation in serum-free basal medium for 24 hr. After 5-20 minutes treatment with EGF (60ng/ml) or 50 ul of the supernatant produced in Example 30, the medium was removed and 100 ml of extraction buffer ((20 mM HEPES pH 7.5, 0.15 M NaCl, 1% Triton X-100, 0.1% SDS, 2 mM Na3VO4, 2 mM Na4P2O7 and a cocktail of protease inhibitors (# 1836170) obtained from Boeheringer Mannheim (Indianapolis, Ind.) is added to each well and the plate is shaken on a rotating shaker for 5 minutes at 4° C. The plate is then placed in a vacuum transfer manifold and the extract filtered through the 0.45 mm membrane bottoms of each well using house vacuum. Extracts are collected in a 96-well catch/assay plate in the bottom of the vacuum manifold and immediately placed on ice. To obtain extracts clarified by centrifugation, the content of each well, after detergent solubilization for 5 minutes, is removed and centrifuged for 15 minutes at 4 degree C. at 16,000×g.

[1198] Test the filtered extracts for levels of tyrosine kinase activity. Although many methods of detecting tyrosine kinase activity are known, one method is described here.

[1199] Generally, the tyrosine kinase activity of a supernatant is evaluated by determining its ability to phosphorylate a tyrosine residue on a specific substrate (a biotinylated peptide). Biotinylated peptides that can be used for this purpose include PSK1 (corresponding to amino acids 6-20 of the cell division kinase cdc2-p34) and PSK2 (corresponding to amino acids 1-17 of gastrin). Both peptides are substrates for a range of tyrosine kinases and are available from Boehringer Mannheim.

[1200] The tyrosine kinase reaction is set up by adding the following components in order. First, add 10 ul of 5 uM Biotinylated Peptide, then 10 ul ATP/Mg₂₊ (5mM ATP/50 mM MgCl₂), then 10 ul of 5×Assay Buffer (40 mM imidazole hydrochloride, pH7.3, 40 mM beta-glycerophosphate, 1 mM EGTA, 100 mM MgCl₂, 5 mM MnCl₂, 0.5 mg/ml BSA), then 5 ul of Sodium Vanadate(1 mM), and then 5 ul of water. Mix the components gently and preincubate the reaction mix at 30 degree C. for 2 min. Initial the reaction by adding 10 ul of the control enzyme or the filtered supernatant.

[1201] The tyrosine kinase assay reaction is then terminated by adding 10 ul of 120 mm EDTA and place the reactions on ice.

[1202] Tyrosine kinase activity is determined by transferring 50 ul aliquot of reaction mixture to a microtiter plate (MTP) module and incubating at 37 degree C. for 20 min. This allows the streptavadin coated 96 well plate to associate with the biotinylated peptide. Wash the MTP module with 300 ul/well of PBS four times. Next add 75 ul of anti-phospotyrosine antibody conjugated to horse radish peroxidase(anti-P-Tyr-POD(0.5 u/ml)) to each well and incubate at 37 degree C. for one hour. Wash the well as above.

[1203] Next add 100 ul of peroxidase substrate solution (Boehringer Mannheim) and incubate at room temperature for at least 5 mins (up to 30 min). Measure the absorbance of the sample at 405 nm by using ELISA reader. The level of bound peroxidase activity is quantitated using an ELISA reader and reflects the level of tyrosine kinase activity.

### Example 39

[1204] High-Throughput Screening Assay Identifying Phosphorylation Activity

[1205] As a potential alternative and/or compliment to the assay of protein tyrosine kinase activity described in Example 38, an assay which detects activation (phosphorylation) of major intracellular signal transduction intermediates can also be used. For example, as described below one particular assay can detect tyrosine phosphorylation of the Erk-1 and Erk-2 kinases. However, phosphorylation of other molecules, such as Raf, JNK, p38 MAP, Map kinase kinase (MEK), MEK kinase, Src, Muscle specific kinase (MuSK), IRAK, Tec, and Janus, as well as any other phosphoserine, phosphotyrosine, or phosphothreonine molecule, can be detected by substituting these molecules for Erk-1 or Erk-2 in the following assay.

[1206] Specifically, assay plates are made by coating the wells of a 96-well ELISA plate with 0.1 ml of protein G (1 ug/ml) for 2 hr at room temp, (RT). The plates are then rinsed with PBS and blocked with 3% BSA/PBS for 1 hr at RT. The protein G plates are then treated with 2 commercial monoclonal antibodies (100 ng/well) against Erk-1 and Erk-2 (1 hr at RT) (Santa Cruz Biotechnology). (To detect other molecules, this step can easily be modified by substituting a monoclonal antibody detecting any of the above described molecules.) After 3-5 rinses with PBS, the plates are stored at 4 degree C. until use.

[1207] A431 cells are seeded at 20,000/well in a 96-well Loprodyne filterplate and cultured overnight in growth medium. The cells are then starved for 48 hr in basal medium (DMEM) and then treated with EGF (6 ng/well) or 50 ul of the supernatants obtained in Example 30 for 5-20 minutes. The cells are then solubilized and extracts filtered directly into the assay plate.

[1208] After incubation with the extract for 1 hr at RT, the wells are again rinsed. As a positive control, a commercial preparation of MAP kinase (10 ng/well) is used in place of A431 extract. Plates are then treated with a commercial polyclonal (rabbit) antibody (1 ug/ml) which specifically recognizes the phosphorylated epitope of the Erk-1 and Erk-2 kinases (1 hr at RT). This antibody is biotinylated by standard procedures. The bound polyclonal antibody is then quantitated by successive incubations with Europium-streptavidin and Europium fluorescence enhancing reagent in the Wallac DELFIA instrument (time-resolved fluorescence). An increased fluorescent signal over background indicates a phosphorylation by polypeptide of the present invention or a molecule induced by polypeptide of the present invention.

### Example 40

[1209] Assay for the Stimulation of Bone Marrow CD34+ Cell Proliferation

[1210] This assay is based on the ability of human CD34+ to proliferate in the presence of hematopoietic growth factors and evaluates the ability of isolated polypeptides expressed in mammalian cells to stimulate proliferation of CD34+ cells.

[1211] It has been previously shown that most mature precursors will respond to only a single signal. More immature precursors require at least two signals to respond. Therefore, to test the effect of polypeptides on hematopoietic activity of a wide range of progenitor cells, the assay contains a given polypeptide in the presence or absence of other hematopoietic growth factors. Isolated cells are cultured for 5 days in the presence of Stem Cell Factor (SCF) in combination with tested sample. SCF alone has a very limited effect on the proliferation of bone marrow (BM) cells, acting in such conditions only as a “survival” factor. However, combined with any factor exhibiting stimulatory effect on these cells (e.g., IL-3), SCF will cause a synergistic effect. Therefore, if the tested polypeptide has a stimulatory effect on a hematopoietic progenitors, such activity can be easily detected. Since normal BM cells have a low level of cycling cells, it is likely that any inhibitory effect of a given polypeptide, or agonists or antagonists thereof, might not be detected. Accordingly, assays for an inhibitory effect on progenitors is preferably tested in cells that are first subjected to in vitro stimulation with SCF+IL+3, and then contacted with the compound that is being evaluated for inhibition of such induced proliferation.

[1212] Briefly, CD34+ cells are isolated using methods known in the art. The cells are thawed and resuspended in medium (QBSF 60 serum-free medium with 1% L-glutamine (500 ml) Quality Biological, Inc., Gaithersburg, Md. Cat# 160-204-101). After several gentle centrifugation steps at 200×g, cells are allowed to rest for one hour. The cell count is adjusted to 2.5×10⁵ cells/ml. During this time, 100 μl of sterile water is added to the peripheral wells of a 96-well plate. The cytokines that can be tested with a given polypeptide in this assay is rhSCF (R&D Systems, Minneapolis, Minn., Cat# 255-SC) at 50 ng/ml alone and in combination with rhSCF and rhIL-3 (R&D Systems, Minneapolis, Minn., Cat# 203-ML) at 30 ng/ml. After one hour, 10 μl of prepared cytokines, 50 μl of the supernatants prepared in Example 30 (supernatants at 1:2 dilution=50 μl) and 20 μl of diluted cells are added to the media which is already present in the wells to allow for a final total volume of 100 μl. The plates are then placed in a 37° C./5% CO₂ incubator for five days.

[1213] Eighteen hours before the assay is harvested, 0.5 μCi/well of [3H] Thymidine is added in a 10 μl volume to each well to determine the proliferation rate. The experiment is terminated by harvesting the cells from each 96-well plate to a filtermat using the Tomtec Harvester 96. After harvesting, the filtermats are dried, trimmed and placed into OmniFilter assemblies consisting of one OmniFilter plate and one OmniFilter Tray. 60 μl Microscint is added to each well and the plate sealed with TopSeal-A press-on sealing film A bar code 15 sticker is affixed to the first plate for counting. The sealed plates is then loaded and the level of radioactivity determined via the Packard Top Count and the printed data collected for analysis. The level of radioactivity reflects the amount of cell proliferation.

[1214] The studies described in this example test the activity of a given polypeptide to stimulate bone marrow CD34+ cell proliferation. One skilled in the art could easily modify the exemplified studies to test the activity of polynucleotides (e.g., gene therapy), antibodies, agonists, and/or antagonists and fragments and variants thereof. As a nonlimiting example, potential antagonists tested in this assay would be expected to inhibit cell proliferation in the presence of cytokines and/or to increase the inhibition of cell proliferation in the presence of cytokines and a given polypeptide. In contrast, potential agonists tested in this assay would be expected to enhance cell proliferation and/or to decrease the inhibition of cell proliferation in the presence of cytokines and a given polypeptide.

[1215] The ability of a gene to stimulate the proliferation of bone marrow CD34+ cells indicates that polynucleotides and polypeptides corresponding to the gene are useful for the diagnosis and treatment of disorders affecting the immune system and hematopoiesis. Representative uses are described in the “Immune Activity” and “infectious Disease” sections above, and elsewhere herein.

### Example 41

[1216] Assay for Extracellular Matrix Enhanced Cell Response (EMECR)

[1217] The objective of the Extracellular Matrix Enhanced Cell Response (EMECR) assay is to identify gene products (e.g., isolated polypeptides) that act on the hematopoietic stem cells in the context of the extracellular matrix (ECM) induced signal.

[1218] Cells respond to the regulatory factors in the context of signal(s) received from the surrounding microenvironment. For example, fibroblasts, and endothelial and epithelial stem cells fail to replicate in the absence of signals from the ECM. Hematopoietic stem cells can undergo self-renewal in the bone marrow, but not in in vitro suspension culture. The ability of stem cells to undergo self-renewal in vitro is dependent upon their interaction with the stromal cells and the ECM protein fibronectin (fn). Adhesion of cells to fn is mediated by the α₅.β₁ and α₄.β₁ integrin receptors, which are expressed by human and mouse hematopoietic stem cells. The factor(s) which integrate with the ECM environment and responsible for stimulating stem cell self-renewal has not yet been identified. Discovery of such factors should be of great interest in gene therapy and bone marrow transplant applications

[1219] Briefly, polystyrene, non tissue culture treated, 96-well plates are coated with fn fragment at a coating concentration of 0.2 μg/cm². Mouse bone marrow cells are plated (1,000 cells/well ) in 0.2 ml of serum-free medium. Cells cultured in the presence of IL-3 (5 ng/ml)+SCF (50 ng/ml) would serve as the positive control, conditions under which little self-renewal but pronounced differentiation of the stem cells is to be expected. Gene products of the invention (e.g., including, but not limited to, polynucleotides and polypeptides of the present invention, and supernatants produced in Example 30), are tested with appropriate negative controls in the presence and absence of SCF(5.0 ng/ml), where test factor supernates represent 10% of the total assay volume. The plated cells are then allowed to grow by incubating in a low oxygen environment (5% CO₂, 7% O₂, and 88% N₂) tissue culture incubator for 7 days. The number of proliferating cells within the wells is then quantitated by measuring thymidine incorporation into cellular DNA. Verification of the positive hits in the assay will require phenotypic characterization of the cells, which can be accomplished by scaling up of the culture system and using appropriate antibody reagents against cell surface antigens and FACScan.

[1220] One skilled in the art could easily modify the exemplified studies to test the activity of polynucleotides (e.g., gene therapy), antibodies, agonists, and/or antagonists and fragments and variants thereof.

[1221] If a particular polypeptide of the present invention is found to be a stimulator of hematopoietic progenitors, polynucleotides and polypeptides corresponding to the gene encoding said polypeptide may be useful for the diagnosis and treatment of disorders affecting the immune system and hematopoiesis. Representative uses are described in the “Immune Activity” and “Infectious Disease” sections above, and elsewhere herein. The gene product may also be useful in the expansion of stem cells and committed progenitors of various blood lineages, and in the differentiation and/or proliferation of various cell types.

[1222] Additionally, the polynucleotides and/or polypeptides of the gene of interest and/or agonists and/or antagonists thereof, may also be employed to inhibit the proliferation and differentiation of hematopoietic cells and therefore may be employed to protect bone marrow stem cells from chemotherapeutic agents during chemotherapy. This antiproliferative effect may allow administration of higher doses of chemotherapeutic agents and, therefore, more effective chemotherapeutic treatment.

[1223] Moreover, polynucleotides and polypeptides corresponding to the gene of interest may also be useful for the treatment and diagnosis of hematopoietic related disorders such as, for example, anemia, pancytopenia, leukopenia, thrombocytopenia or leukemia since stromal cells are important in the production of cells of hematopoietic lineages. The uses include bone marrow cell ex-vivo culture, bone marrow transplantation, bone marrow reconstitution, radiotherapy or chemotherapy of neoplasia.

### Example 42

[1224] Human Dermal Fibroblast and Aortic Smooth Muscle Cell Proliferation

[1225] The polypeptide of interest is added to cultures of normal human dermal fibroblasts (NHDF) and human aortic smooth muscle cells (AoSMC) and two co-assays are performed with each sample. The first assay examines the effect of the polypeptide of interest on the proliferation of normal human dermal fibroblasts (NHDF) or aortic smooth muscle cells (AoSMC). Aberrant growth of fibroblasts or smooth muscle cells is a part of several pathological processes, including fibrosis, and restenosis. The second assay examines IL6 production by both NHDF and SMC. IL6 production is an indication of functional activation. Activated cells will have increased production of a number of cytokines and other factors, which can result in a proinflammatory or immunomodulatory outcome. Assays are run with and without co-TNFa stimulation, in order to check for costimulatory or inhibitory activity.

[1226] Briefly, on day 1, 96-well black plates are set up with 1000 cells/well (NHDF) or 2000 cells/well (AoSMC) in 100 μl culture media. NHDF culture media contains: Clonetics FB basal media, 1 mg/ml hFGF, 5 mg/ml insulin, 50 mg/ml gentamycin, 2%FBS, while AoSMC culture media contains Clonetics SM basal media, 0.5 μg/ml hEGF, 5 mg/ml insulin, 1 μg/ml hFGF, 50 mg/ml gentamycin, 50 μg/ml Amphotericin B, 5%FBS. After incubation at 37° C. for at least 4-5 hours, culture media is aspirated and replaced with growth arrest media. Growth arrest media for NHDF contains fibroblast basal media, 50 mg/ml gentamycin, 2% FBS, while growth arrest media for AoSMC contains SM basal media, 50 mg/ml gentamycin, 50 μg/ml Amphotericin B, 0.4% FBS. Incubate at 37° C. until day 2.

[1227] On day 2, serial dilutions and templates of the polypeptide of interest are designed such that they always include media controls and known-protein controls. For both stimulation and inhibition experiments, proteins are diluted in growth arrest media. For inhibition experiments, TNFa is added to a final concentration of 2 ng/ml (NHDF) or 5 ng/ml (AoSMC). Add 1/3 vol media containing controls or polypeptides of the present invention and incubate at 37° C./5% CO₂ until day 5.

[1228] Transfer 60 μl from each well to another labeled 96-well plate, cover with a plate-sealer, and store at 4° C. until Day 6 (for IL6 ELISA). To the remaining 100 μl in the cell culture plate, aseptically add Alamar Blue in an amount equal to 10% of the culture volume (10 μl). Return plates to incubator for 3 to 4 hours. Then measure fluorescence with excitation at 530 nm and emission at 590 nm using the CytoFluor. This yields the growth stimulation/inhibition data.

[1229] On day 5, the IL6 ELISA is performed by coating a 96 well plate with 50-100 ul/well of Anti-Human IL6 Monoclonal antibody diluted in PBS, pH 7.4, incubate ON at room temperature.

[1230] On day 6, empty the plates into the sink and blot on paper towels. Prepare Assay Buffer containing PBS with 4% BSA. Block the plates with 200 μl/well of Pierce Super Block blocking buffer in PBS for 1-2 hr and then wash plates with wash buffer (PBS, 0.05% Tween-20). Blot plates on paper towels. Then add 50 μl/well of diluted Anti-Human IL-6 Monoclonal, Biotin-labeled antibody at 0.50 mg/ml. Make dilutions of IL-6 stock in media (30, 10, 3, 1, 0.3, 0 ng/ml). Add duplicate samples to top row of plate. Cover the plates and incubate for 2 hours at RT on shaker. Plates are washed with wash buffer and blotted on paper towels. Dilute EU-labeled Streptavidin 1:1000 in Assay buffer, and add 100 μl/well. Cover the plate and incubate 1 h at RT. Plates are again washed with wash buffer and blotted on paper towels. Add 100 μl/well of Enhancement Solution and shake for 5 minutes. Read the plate on the Wallac DELFIA Fluorometer. Readings from triplicate samples in each assay are tabulated and averaged.

[1231] A positive result in this assay suggests AoSMC cell proliferation and that the polypeptide of the present invention may be involved in dermal fibroblast proliferation and/or smooth muscle cell proliferation. A positive result also suggests many potential uses of polypeptides, polynucleotides, agonists and/or antagonists of the polynucleotide/polypeptide of the present invention which gives a positive result. For example, inflammation and immune responses, wound healing, and angiogenesis, as detailed throughout this specification. Particularly, polypeptides of the present invention and polynucleotides of the present invention may be used in wound healing and dermal regeneration, as well as the promotion of vasculargenesis, both of the blood vessels and lymphatics. The growth of vessels can be used in the treatment of, for example, cardiovascular diseases. Additionally, antagonists of polypeptides and polynucleotides of the invention may be useful in treating diseases, disorders, and/or conditions which involve angiogenesis by acting as an anti-vascular (e.g., anti-angiogenesis). These diseases, disorders, and/or conditions are known in the art and/or are described herein, such as, for example, malignancies, solid tumors, benign tumors, for example hemangiomas, acoustic neuromas, neurofibromas, trachomas, and pyogenic granulomas; artheroscleric plaques; ocular angiogenic diseases, for example, diabetic retinopathy, retinopathy of prematurity, macular degeneration, corneal graft rejection, neovascular glaucoma, retrolental fibroplasia, rubeosis, retinoblastoma, uvietis and Pterygia (abnormal blood vessel growth) of the eye; rheumatoid arthritis; psoriasis; delayed wound healing; endometriosis; vasculogenesis; granulations; hypertrophic scars (keloids); nonunion fractures; scleroderma; trachoma; vascular adhesions; myocardial angiogenesis; coronary collaterals; cerebral collaterals; arteriovenous malformations; ischemic limb angiogenesis; Osler-Webber Syndrome; plaque neovascularization; telangiectasia; hemophiliac joints; angiofibroma; fibromuscular dysplasia; wound granulation; Crohn's disease; and atherosclerosis. Moreover, antagonists of polypeptides and polynucleotides of the invention may be useful in treating anti-hyperproliferative diseases and/or anti-inflammatory known in the art and/or described herein.

[1232] One skilled in the art could easily modify the exemplified studies to test the activity of polynucleotides (e.g., gene therapy), antibodies, agonists, and/or antagonists and fragments and variants thereof.

### Example 43

[1233] Cellular Adhesion Molecule (CAM) Expression on Endothelial Cells

[1234] The recruitment of lymphocytes to areas of inflammation and angiogenesis involves specific receptor-ligand interactions between cell surface adhesion molecules (CAMs) on lymphocytes and the vascular endothelium. The adhesion process, in both normal and pathological settings, follows a multi-step cascade that involves intercellular adhesion molecule-1 (ICAM-1), vascular cell adhesion molecule-1 (VCAM-1), and endothelial leukocyte adhesion molecule-1 (E-selectin) expression on endothelial cells (EC). The expression of these molecules and others on the vascular endothelium determines the efficiency with which leukocytes may adhere to the local vasculature and extravasate into the local tissue during the development of an inflammatory response. The local concentration of cytokines and growth factor participate in the modulation of the expression of these CAMs.

[1235] Briefly, endothelial cells (e.g., Human Umbilical Vein Endothelial cells (HUVECs)) are grown in a standard 96 well plate to confluence, growth medium is removed from the cells and replaced with 100 μl of 199 Medium (10% fetal bovine serum (FBS)). Samples for testing and positive or negative controls are added to the plate in triplicate (in 10 μl volumes). Plates are then incubated at 37° C. for either 5 h (selectin and integrin expression) or 24 h (integrin expression only). Plates are aspirated to remove medium and 100 μl of 0.1% paraformaldehyde-PBS(with Ca++ and Mg++) is added to each well. Plates are held at 4° C. for 30 min. Fixative is removed from the wells and wells are washed 1× with PBS(+Ca,Mg)+0.5% BSA and drained. 10 μl of diluted primary antibody is added to the test and control wells. Anti-ICAM-1-Biotin, Anti-VCAM-1-Biotin and Anti-E-selectin-Biotin are used at a concentration of 10 μg/ml (1:10 dilution of 0.1 mg/ml stock antibody). Cells are incubated at 37° C. for 30 min. in a humidified environment. Wells are washed three times with PBS(+Ca,Mg)+0.5% BSA. 20 μl of diluted ExtrAvidin-Alkaline Phosphotase (1:5,000 dilution, refered to herein as the working dilution) are added to each well and incubated at 37° C. for 30 min. Wells are washed three times with PBS(+Ca,Mg)+0.5% BSA. Dissolve 1 tablet of p-Nitrophenol Phosphate pNPP per 5 ml of glycine buffer (pH 10.4). 100 μl of pNPP substrate in glycine buffer is added to each test well. Standard wells in triplicate are prepared from the working dilution of the ExtrAvidin-Alkaline Phosphotase in glycine buffer: 1:5,000 (10⁰)>10^{-0.5}>10⁻¹>10⁻¹⁵0.5 μl of each dilution is added to triplicate wells and the resulting AP content in each well is 5.50 ng, 1.74 ng, 0.55 ng, 0.18 ng. 100 μl of pNNP reagent is then added to each of the standard wells. The plate is incubated at 37° C. for 4 h. A volume of 50 μl of 3M NaOH is added to all wells. The plate is read on a plate reader at 405 nm using the background subtraction option on blank wells filled with glycine buffer only. Additionally, the template is set up to indicate the concentration of AP-conjugate in each standard well [5.50 ng; 1.74 ng; 0.55 ng; 0.18 ng]. Results are indicated as amount of bound AP-conjugate in each sample.

### Example 44

[1236] Alamar Blue Endothelial Cells Proliferation Assay

[1237] This assay may be used to quantitatively determine protein mediated inhibition of bFGF-induced proliferation of Bovine Lymphatic Endothelial Cells (LECs), Bovine Aortic Endothelial Cells (BAECs) or Human Microvascular Uterine Myometrial Cells (UTMECs). This assay incorporates a fluorometric growth indicator based on detection of metabolic activity. A standard Alamar Blue Proliferation Assay is prepared in EGM-2MV with 10 ng /ml of bFGF added as a source of endothelial cell stimulation. This assay may be used with a variety of endothelial cells with slight changes in growth medium and cell concentration. Dilutions of the protein batches to be tested are diluted as appropriate. Serum-free medium (GIBCO SFM) without bFGF is used as a non-stimulated control and Angiostatin or TSP-1 are included as a known inhibitory controls.

[1238] Briefly, LEC, BAECs or UTMECs are seeded in growth media at a density of 5000 to 2000 cells/well in a 96 well plate and placed at 37-C. overnight. After the overnight incubation of the cells, the growth media is removed and replaced with GIBCO EC-SFM. The cells are treated with the appropriate dilutions of the protein of interest or control protein sample(s) (prepared in SFM) in triplicate wells with additional bFGF to a concentration of 10 ng/ml. Once the cells have been treated with the samples, the plate(s) is/are placed back in the 37° C. incubator for three days. After three days 10 ml of stock alamar blue (Biosource Cat# DAL1100) is added to each well and the plate(s) is/are placed back in the 37° C. incubator for four hours. The plate(s) are then read at 530 nm excitation and 590 nm emission using the CytoFluor fluorescence reader. Direct output is recorded in relative fluorescence units.

[1239] Alamar blue is an oxidation-reduction indicator that both fluoresces and changes color in response to chemical reduction of growth medium resulting from cell growth. As cells grow in culture, innate metabolic activity results in a chemical reduction of the immediate surrounding environment. Reduction related to growth causes the indicator to change from oxidized (non-fluorescent blue) form to reduced (fluorescent red) form. i.e. stimulated proliferation will produce a stronger signal and inhibited proliferation will produce a weaker signal and the total signal is proportional to the total number of cells as well as their metabolic activity. The background level of activity is observed with the starvation medium alone. This is compared to the output observed from the positive control samples (bFGF in growth medium) and protein dilutions.

### Example 45

[1240] Detection of Inhibition of a Mixed Lymphocyte Reaction

[1241] This assay can be used to detect and evaluate inhibition of a Mixed Lymphocyte Reaction (MLR) by gene products (e.g., isolated polypeptides). Inhibition of a MLR may be due to a direct effect on cell proliferation and viability, modulation of costimulatory molecules on interacting cells, modulation of adhesiveness between lymphocytes and accessory cells, or modulation of cytokine production by accessory cells. Multiple cells may be targeted by these polypeptides since the peripheral blood mononuclear fraction used in this assay includes T, B and natural killer lymphocytes, as well as monocytes and dendritic cells.

[1242] Polypeptides of interest found to inhibit the MLR may find application in diseases associated with lymphocyte and monocyte activation or proliferation. These include, but are not limited to, diseases such as asthma, arthritis, diabetes, inflammatory skin conditions, psoriasis, eczema, systemic lupus erythematosus, multiple sclerosis, glomerulonephritis, inflammatory bowel disease, crohn's disease, ulcerative colitis, arteriosclerosis, cirrhosis, graft vs. host disease, host vs. graft disease, hepatitis, leukemia and lymphoma.

[1243] Briefly, PBMCs from human donors are purified by density gradient centrifugation using Lymphocyte Separation Medium (LSM®, density 1.0770 g/ml, Organon Teknika Corporation, West Chester, Pa.). PBMCs from two donors are adjusted to 2×10⁶ cells/ml in RPMI-1640 (Life Technologies, Grand Island, N.Y.) supplemented with 10% FCS and 2 mM glutamine. PBMCs from a third donor is adjusted to 2×10⁵ cells/ml. Fifty microliters of PBMCs from each donor is added to wells of a 96-well round bottom microtiter plate. Dilutions of test materials (50 μl) is added in triplicate to microtiter wells. Test samples (of the protein of interest) are added for final dilution of 1:4; rhuIL-2 (R&D Systems, Minneapolis, Minn., catalog number 202-IL) is added to a final concentration of 1 μg/ml; anti-CD4 mAb (R&D Systems, clone 34930.11, catalog number MAB379) is added to a final concentration of 10 μg/ml. Cells are cultured for 7-8 days at 37° C. in 5% CO₂, and 1 μC of [³H] thymidine is added to wells for the last 16 hrs of culture. Cells are harvested and thymidine incorporation determined using a Packard TopCount. Data is expressed as the mean and standard deviation of triplicate determinations.

[1244] Samples of the protein of interest are screened in separate experiments and compared to the negative control treatment, anti-CD4 mAb, which inhibits proliferation of lymphocytes and the positive control treatment, IL-2 (either as recombinant material or supernatant), which enhances proliferation of lymphocytes.

[1245] One skilled in the art could easily modify the exemplified studies to test the activity of polynucleotides (e.g., gene therapy), antibodies, agonists, and/or antagonists and fragments and variants thereof.

[1246] It will be clear that the invention may be practiced otherwise than as particularly described in the foregoing description and examples. Numerous modifications and variations of the present invention are possible in light of the above teachings and, therefore, are within the scope of the appended claims.

[1247] The entire disclosure of each document cited (including patents, patent applications, journal articles, abstracts, laboratory manuals, books, or other disclosures) in the Background of the Invention, Detailed Description, and Examples is hereby incorporated herein by reference. Further, the paper copy on CD-ROM of the sequence listing submitted herewith and the corresponding computer readable form on CD-ROM are both incorporated herein by reference in their entireties. Moreover, the hard copy of and the corresponding computer readable form of the Sequence Listing of Ser. No. 60/124,270 and International Application No. PCT/US00/05988 are also incorporated herein by reference in their entireties.

The application's sequence listing, which the Patent Office published only in electronic form, follows.

SEQUENCE LISTING (1890 sequences)

SEQ ID NO: 1 - DNA, 717 bp, Homo sapiens
ggcacgagtgtgcctgcctgcctggttatgccggcgatgggcaccagtgcactgatgtagatgaatgctcagaaaacagatgtcaccctgcagctacctgctacaatactcctggttccttctcctgccgttgtcaacccggrtattatggggatggatttcagtgcatacctgactccacctcaagcctgacaccctgtgaacaacagcagcgccatgcccaggcccagtatgcctaccctggggcccggttccacatcccccaatgcgacgagcagggcaacttcctgcccctacagtgtcatggcagcactggtttctgctggtgcgtggaccctgatggtcatgaagttcctggtacccagactccacctggctccaccccrcctcactgtggaccatcaccagagcccacccagaggcccccgaccatctgtgagcgctggagggaaaacctgctggagcactacggtggcaccccccgrgatgaccagtacgtgccccagtgcgatgacctgggccacttcatccccctgcagtgccacggaaagagcgacttctgctggtgtgtggacaaagatggcagagaggtgcagggcaccggctkcccagccaggcaccacccctgcgtgtatacccaccgtcgctccamccatggtccggcccacgccccggccagatgtgkaccctccatctgtgggcaacttcctggtgcta

SEQ ID NO: 2 - DNA, 1625 bp, Homo sapiens
caagaacaaatctgaaggaggcctctgacatcaagcttgaaccaaatacgttgaatggctataaaagcagtgtgacggaaccttgccccgacagtggtgaacagctgcagccagctcctgtgctgcaggaggaagaactggctcatgagactgcacaaaaaggggaggcaaagtgtcataagagtgacacaggcatgtccaaaaagaagtcacgacaaggaaaacttgtgaaacagtttgcaaaaatagaggaatctactccagtgcacgattctcctggaaaagacgacgcggtaccagatttgatgggtccccattctgaccagggtgagcacagtggcactgtgggcgtgcctgtgagctacacagactgtgctccttcacccgtcggttgttcagttgtgacatcagatagcttcagaacaaaagacagctttagaactgcaaaaagtaaaaagaagaggcgaatcacaaggtatgatgcacagttaatcctagaaaataactctgggattcccaaattgactcttcgtaggcgtcatgatagcagcagcaaaacaaatgaccaagagaatgatggaatgaactcttccaaaataagcatcaagttaagcaaagaccatgacaacgataacaatctctatgtagcaaagcttaataatggatttaactcaggatcaggcagtagttctacaaaattaaaaatccagctaaaacgagatgaggaaaatagggggtcttatacagaggggcttcatgaaaatggggtgtgctgcagtgatcctctttctctcttggagtctcgaatggaggtggatgactatagtcagtatgaggaagaaagtacagatgattcctcctcttctgagggcgatgaagaggaggatgactatgatgatgactttgaagacgattttattcctcttcctccagctaagcgcttgaggttaatagttggaaaagactctatagatattgacatttcttcaaggagaagagaagatcagtctttaaggcttaatgcctaagctcttggtcttaacttgacctgggataactactttaaagaaataaaaaattccagtcaattattcctcaactgaaagtttagtggcagcacttctattgtcccttcacttatcagcatactattgtagaaagtgtacagcatactgactcaattcttaagtctgatttgtgcaaatttttatcgtactttttaaatagccttcttacgtgcaattctgagttagaggtaaagccctgttgtaaaataaaggctcaagcaaaattgtacagtgatagcaactttccacacaggacgttgaaaacagtaatgtggctacacagtttttttaactgtaagagcatcagctggctctttaatatatgactaaacaataatttaaaacaaatcatagtagcagcatattaagggtttctagtatgctaatatcaccagcaatgatctttggctttttgatttatttgctagatgtttcccccttggagttttgtcagtttcacactgtttgctggcccaggtgtactgtttgtggcctttgttaatatcgcaaaccattggttgggagtcagattggtttcttaaaaaaaaaaaaaaaaaa

SEQ ID NO: 3 - DNA, 2435 bp, Homo sapiens
  misc feature (19): n equals a,t,g, or c
  misc feature (28): n equals a,t,g, or c
  misc feature (51): n equals a,t,g, or c
  misc feature (53): n equals a,t,g, or c
  misc feature (110): n equals a,t,g, or c
  misc feature (2433): n equals a,t,g, or c
  misc feature (2434): n equals a,t,g, or c
ggggaaaatttcccccggnggggtctgnaaccccccaacaggcgggtcccngncaagakkwrasttscmkttgsygsttgyctktcytstgtgtgtgtgaaattatgaantcttttgaaagtttggcgcgcggamcaggtttctgttgcttacaactcattagattttgaaccagagatattctttgccttggggtctccaattgctatgtttctcactattcgaggagttgataggatagatgagaattacagccttcctacctgtaaagggttcttcaatatttatcatccgcttgatccagtggcatatagattagaacctatgattgttccagatttggacctaaaagctgttctcattccacatcacaaaggcagaaaaagacttcatttagaattgaaagagagtctctctcgtatgggatctgatttgaagcagggttttattagctctctcaaaagtgcttggcagacattaaatgagtttgcccgtgctcatacgtcttcaacccagttgcaagaagaattggagaaggtggccaatcagatcaaagaagaagaagaaaagcaagtagttgaagcagaaaaggttgttgaaagtccagatttttccaaggatgaggactacttaggaaaggttggaaaggttaaatggaggccgccgrawttgactacgttctccaagaaaaaccaatagagagttttaatggaataccttttcgctcttccagagtcacttatgctattgggcaatctgaagatactgctctgttactacttaaagaaatttatcgaacaatgaacattagtccagaacagccccagcattgatcaaacttcagttttactgtactttcttgtctgcacagaaagtcccagtacaacttccattgctgagaaaatcctcagaggactttcccacttcgctcctgtgatggatgacagaagagtgattcattaacaattgctcagccacaattctcggatatagggattcaaaagacaggatacagaactaacacagtgaaaaaaatcagtaccacatttggacagtataggtgagaaaacataattataaaaatgatgccatgaaaaattccacagatcagtttagttgtatagttgtcaaagttatatgtgatatcaatgaagaaatatttgtagcatgtaaacggttatttctgtttcttaaaaagtattgttagtgggctattaaacttggatttttctttttattaatgcagtatgttctttttattcaagtatgaacttgttgagaaactatagtaatatgatttttaagagatttatgttctacttaaaatgtgaattgtacttctgagctgccttaatgcaaggtcatttatatttgttaagaggaaataatcaagatcactcatatcccaactgaatctgaggttttataaatccctcaaacgattgctgagagcctgattgtggaaagaagtgagatgcaccttattttcaagaagtcctgggaagcgctctcctagcacgtccatttccaggaggagaagcaagcagatgagaggttttccattttgtcatccaaggtagctgtgcacttgccttgttgctgaagttccaataatgtgaaaaaccaaagtagaggtttttttcttcttctttttgttttctattaatttcacttataccaaagtgtttgaaagtatgaaatgtgttgcttctgagttatataaggctacttcatgacaagactgctttgtaatatttcactttgttttactacaaattcagatcactttgttttactataaattcagattatccaaatattttcctaatactatgtgggaatgctgattttccttttgttacgtagtggaaacattttgcattgtttacatagttctcatggaacatggaaatttttgaaagtgatatatgatacacattttttgtgtatgtattctaattagtgtgaataaagcagtaacattaatgcattttttaagcagccaaacttatgtatttctcttgtctcyccttaaaagtgtcccccctgaacctcagtgtttaatcccccctttycattttgagtacccgccttatatggtccagtatgtaacgttagcattggcyccctaatggtagaattagaacagcaagattgtagagcctgtaattgactcccagacaacatagatttcagcccacctcattcctacagctgaggcccaggacaataaatgcctttcccagactgggtagtggcagatctgggatggaatatggttttcttgattccctttcagccttcatttctctctctcaggactactactttttaattacttttcacttaatttcccaatactgatgaaataaagaaaaatgagggttatttatatacatttcaataaaatccaatttgatttttcaacttaannt

SEQ ID NO: 4 - DNA, 986 bp, Homo sapiens
  misc feature (131): n equals a,t,g, or c
ccgagttgaccccacggtctgagatgtccaagctgcccacagacagcagtgtcccgcagacaggcgcggcgaatggtgacagagacgtcccgcaggcggagaatacaagagcttgaagaacgccgcaggantttcgtggaagcctgcagagcaagggaagcagcgtttgatgccgaatatcagcgaaatcctcacagggtggacctcgatattttaacctttacgatagctctgactgcctctgaagttatcaaccctctgatagaagaacttggttgcgataagtttatcaatagagaatagttaggtggtgacactacttcaagagaacctctgcattccagtcataccaatcctgcaacttgattttcagaagtcaagagtatatcgcgataagacagtgcacaggtggaggggaaaaaaagggggagggggaagcttatcttgaaaaagcatcacagaagtagaaaaaaatgtcgaaagcattataactgtaacgttctttgagtttgtgattgatccacatttttccccctgcattatggaaaatgtctctcagcattgctttattacaaagtaaaggatggttttataaaattgagactgatgaaacatcaatactagagcccatgaggatgaaagaaattatcaaatagtgctgaacagaataagatgttaacgctgagttattaggactggaaggctatgaaaagaacttgaaattgtcggaatatgtgctctcttcatgtcatattcaatagaagtttctagtttaagattgattttgtgttttcttaggcatttcaagtgacaagcaaagtaaatgtatatattatgtgataaatcatgttttcaagaacgtcaaatttctggacttttttctttcaatttttaatttttaaagtttttttggtattaaaaaatctattcacaagccaaaaaatatataaaatatacagcgaaaagccaaaaaaaaaaaaaaaaac

SEQ ID NO: 5 - DNA, 370 bp, Homo sapiens
tagtggatcccccgggctgcaggaattccgagcccctggcgtccagcaagatgagcgccttgccagcccaatccattcaacctacatcccaattcccacttcagcaatttgtgccacaggatctaatggctctgccccaacacgaatctcagtacaatgcttgtcccctgccaccacaggctcagcatcagtagatctctgttgtaccagagatatttctctgttacctggagagccacctattgctgttcccacaggtgtttttggccccttgccgactggcagtgtcggtttgctatttgatctctcaagcctaaatttaaaaggtgttcaagtacatactggtgtaattgattctgatattcaggtg

SEQ ID NO: 6 - DNA, 511 bp, Homo sapiens
  misc feature (511): n equals a,t,g, or c
atgagtcattgtgcttggctccaaaatctttaaagcctatctaaaatgttctctttgatttcatgccacaaaatttgttagctccacctttaaaatatatttagattaagacctctcttcatcaccaccctgctgtcaccctaacaaagcaaccatcatctctcaaaataaatcctaatgtccttagggcttcctaggcctactctttatgccccaggctacctatccaggtgaatctcttccagttctcctccatgaatttctgtctcacagaatgcatgtaccattgcactttgtaacgtcagtctctcccaccagacaatgatcagattcttagttgtctctttatacccattcacagtgcactgactgagcacaaatttaaggcttcaataaatggtaagtgaatgaataatgaatgaatgaatgctacaatattgattataatggataaagagatatattgacctgcttgacagaaagccgaggggggcaaagtaaaatgggcctn

SEQ ID NO: 7 - DNA, 718 bp, Homo sapiens
  misc feature (565): n equals a,t,g, or c
  misc feature (630): n equals a,t,g, or c
  misc feature (634): n equals a,t,g, or c
  misc feature (676): n equals a,t,g, or c
  misc feature (702): n equals a,t,g, or c
gcgacggcctgacgtcggcggagggaagccggcccaggctcggtgaggaggcaaggttctgaggggacaggctgacstggaggrccagaggcccccggaggagcactgaaggagaagatctgccagtgggtctccattgcccagctcctgcccacactcccgcctgttgccctgaccagagtcatcatgcctcttgagcagaggagtcagcactgcaagcctgaagaaggccttgaggcccgaggagaggccctgggcctggtgggtgcgcagctcctgctactgaggagcaggaggctgcctcctcctcttctamtctarttgaagtcaccctgggggaggtgcctgctgccgagtcaccagatcctccccagagtcctcagggagcctccagcctccccamtaccatgaactaccctctctggagccaatcctatgaggactccagcaaccaagaagaggaggggccaagcaccttccctgacctggagtctgagttccaagcagcactcagtaggaaggtggccaagttggttcattttctgctcctcaagtatcgagccanggagccggtcacaaaggcagaaatgctggggagtgtcgtcggaaaattggcaagtacttcttttnctgngatcttcaagcaaaagctttccgatttcctttgcaacttggncttttggcattcgaagcttgaatggnaagtgggacccccatt

SEQ ID NO: 8 - DNA, 445 bp, Homo sapiens
  misc feature (353): n equals a,t,g, or c
  misc feature (411): n equals a,t,g, or c
  misc feature (435): n equals a,t,g, or c
aattcggcacgagctgcactcccggctggacaacagagcaagactgtgtctcaaaaaaataaaaataaaaataaaataaaataaaaagaaaaaaggaaagaaaagaaagtgtaagacatatttgatacataatttggccgagtttatccataaattctatgtcttcctttttatctcctttcataattctacaccctgctgtggcctggccaacataatgatttaggtgatctagagtttagtcaaactggataattgattgtaattgcttagaaatttaccacaaaaatcgcctctgtttctttgggattgctcctaacttttcacttcttttgagggctgcacacgctgtnctcagcagctactggtcccagccactgggggaagaaagaaatgcatggtaggacagcncttaccaattccttttaattgccnaattcgaagc

SEQ ID NO: 9 - DNA, 758 bp, Homo sapiens
gtgggactacattctctgtgccgggcttagagaacacgaagagggagccatctgccacactctggaggctgaagcctgcaccagtgctgctcgcctcactgtggtaggtggtggtgatggaaactgcagatcggccagagtggtagaaaagttgctgcagggtttttctggctttgcctgcccagccgctccatgcctggctagaggagaaggaggagccacatgtggtacactggaggctggagcctgcagatggcatggctctgcggctcaccttgctgcagttggtggtggtgacagagactgcagcttgactgtagtgaatttggaaattatctgtctggaagctctgagtttatcttgggacctcaagaggagaggatcacccaactcacagcaatcaaactccaaatggtgctgtaaactgaaccacacatggacaggccattcttccgaggacccttagattgatcccagggggagccctagctgctattccccattcaacgccccttttcagcaggaagtagccagaaggagtcgccgcccaaaatcccctaacagcagttagtgtggcatctccacaggaagtaatgttgtaggagttactaagaaattattttaggcagatagagaggaaaaggggtccttgggaagttttcattttttaaagcatctctggaaaagtttcttgtaaagccccggctcttagagccaggctggcaacctttgatatgcaaatgtaagccattagaaac

SEQ ID NO: 10 - DNA, 3064 bp, Homo sapiens
  misc feature (1375): n equals a,t,g, or c
gcccgtggcaccgagacctgtggccttattcaggtgaccctgttggacacagtggagctggccacatacactgtgcgcaccttcgcactccacaagagtggctccagtgagaagcgtgagctgcgtcagtttcagttcatggcctggccagaccatggagttcctgagtacccaactcccatcctggccttcctacgacgggtcaaggcctgcaaccccctagacgcagggcccatggtggtgcactgcagcgcgggcgtgggccgcaccggctgcttcatcgtgattgatgccatgttggagcggatgaagcacgagaagacggtggacatctatggccacgtgacctgcatgcgatcacagaggaactacatggtgcagacggaggaccagtacgtgttcatccatgaggcgctgctggaggctgccacgtgcggccacacagaggtgcctgcccgcaacctgtatgcccacatccagaagctgggccaagtgcctccaggggagagtgtgaccgccatggagctcgagttcaagttgctggccagctccaaggcccacacgtcccgcttcatcagcgccaacctgccctgcaacaagttcaagaaccggctggtgaacatcatgccctacgaattgacccgtgtgtgtctgcagcccatccgtggtgtggagggctctgactacatcaatgccagcttcctggatggttatagacagcagaaggcctacatagctacacaggggcctctggcagagagcaccgaggacttctggcgcatgctatgggagcacaattccaccatcatcgtcatgctgaccaagcttcgggagatgggcagggagaaatgccaccagtactggccagcagagcgctctgctcgctaccagtactttgttgttgacccgatggctgagtacaacatgccccagtatatcctgcgtgagttcaaggtcacggatgcccgggatgggcagtcaaggacaatccggcagttccagttcacagactggccagagcagggcgtgcccaagacaggcgagggattcattgacttcatcgggcaggtgcataagaccaaggagcagtttggacaggatgggcctatcacggtgcactgcagtgctggcgtgggccgcaccggggtgttcatcactctgagcatcgtcctggagcgcatgcgctaygagggcgtggtcgacatgtttcagaccgtgaagaccctgcgtacacagcgtcctgccatggtgcagacagaggaccagtatcagctgtgctaccgtgcggccctggagtacctcggcagctttgaccactatgcaacgtaactaccgctcccctctcctccgccacccccgccgtggggctccggangggacccagctcctctgagccataccgaccatcgtccagccctcctacgcagatgctgtcactggcagagcacagcccacggggatcacagcgtttcaggaacgttgccacaccaatcagagagcctagaacatccctgggcaagtggatggcccagcaggcaggcactgtggcccttctgtccaccagacccacctggagcccgcttcaagctctctgttgcgctcccgcatttctcatgcttcttctcatggggtggggttggggcaaagcctcctttttaatacattaagtggggtagactgagggattttagcctcttccctctgatttttcctttcgcgaatccgtatctgcagaatgggccactgtaggggttggggtttattttgttttgtttttttttttcttgagttcactttggatccttattttgtatgacttctgctgaaggacagaacattgccttcctcgtgcagagctggggctgccagcctgagcggaggctcggccgtgggccgggaggcagtgctgatccggctgctcctccagcccttcagacgagatcctgtttcagctaaatgcagggaaactcaatgtttttttaagttttgttttccctttaaagcctttttttaggccacattgacagtggtgggcggggagaagatagggaacactcatccctggtcgtctatcccagtgtgtgtttaacattcacagcccagaaccacagatgtgtctgggagagcctggcaaggcattcctcatcaccatcgtgtttgcaaaggttaaaacaaaaacaaaaaaccacaaaaataaaaaacaaaaaaaacaaaaaacccaagaaaaaaaaaaagagtcagcccttggcttctgcttcaaaccctcaagaggggaagcaactccgtgtgcctggggttcccgagggagctgctggctgacctgggcccacagagcctggctttggtccccagcattgcagtatggtgtggtgtttgtaggctgtggggtctggctgtgtggccaaggtgaatagcacaggttagggtgtgtgccacaccccatgcacctcagggccaagcgggggcgtggctggcctttcaggtccaggccagtgggcctggtagcacatgtctgtcctcagagcaggggccagatgattttcctccctggtttgcagctgttttcaaagcccccgataatcgctcttttccactccaagatgccctcataaaccaatgtggcaagactactggacttctatcaatggtactctaatcagtccttattatcccagcttgctgaggggcagggagagcgcctcttcctctgggcagcgctatctagataggtaagtgggggcggggaagggtgcatagctgttttagctgagggacgtggtgccgacgtccccaaacctagctaggctaagtcaagatcaacattccagggttggtaatgttggatgatgaaacattcatttttaccttgtggatgctagtgctgtagagttcactgttgtacacagtctgttttctatttgttaagaaaaactacagcatcattgcataattcttgatggtaataaatttgaataatcagatttcttacaaaaaaaaaaaaaaaaaaaaaaaaacycgrgggggggcccggtacccaattcgccctatagtgagtcgtatacaa

SEQ ID NO: 11 - DNA, 1496 bp, Homo sapiens
  misc feature (643): n equals a,t,g, or c
  misc feature (1478): n equals a,t,g, or c
agaacagcaaggtgggcatttcccggaattgtgtgcagatgcatccagtcgtggcattgcaagaagtctgtctgatgaagctcgggaagcattttgcaatattccctttggctgtgttcctgtgttccctgctcccacttttcttcccctggtttgtgattattaggagagaggttttgcaaagactcgttgctgtgaaagaatctttttttaatttttatcctagagtcagtcacttttattccaggtagtcatgctgatctrcttatccaaagccagctaaccaggttcatcctaccatcctcatggaagactgtgtgtatgaattggagtaacagaactgaaatacacttaaacagtgacagcagtacttcccagggtgggggccatatttctctgtgtcctactctgagcaacttctcagagatacgagggggctagggttttcccatctgggaaatggggtgaaagtctgcagattgttaaatgaaatatagaatcagagaaaaagaaaagtcagtgatataaatagatcatttcatagaaattagggtagatttttatttcaactactactggagaatttaataaaaggcattatttgaaaagtttttctaacatagatttagggtttttttttttnagagtggacacactacatttaaaagcaattattttgctattcagattttttattatctgaaaatgaaattatctgttttacttttcaaagctttgtgaaacaaacttgaagttatagggaggtaagccatctccaactctgcaggtcaaacgaaagtttgggaaatacttttgacatcccacaatacagaatgtcttaacatgagaattgaatttcatgatgtgtggttccatttaatagcggacaccaccccaatctcatgttttcctgttaccctaaaacagtggaaggaaactgggtgtttggtagacttctaaatcatggtctctgacaatttgaatctgagattctcacctccatttactaaagaatcgtgacttaattcaaattgcacagtaatcagtaaagtgaatacgtttttaaaatggaattttctcccttcagcaagcactcattaaggagtgaggctgagtattttaagatagagtgagatctgtgagtgattgaaaggtgatatttaaaaacttggatttcattccagtgtcaggtttgggttttaagttcctttggtccagggaagggtccaagcagccacagttgccctaaatctccatcattaagtcttccagcaaggttaagtgcagtatggaaggagaagggggaagaggacggtaacggccccacactccaggctgagaaagagtaattaggaggcctgasgaggggccgaggaaaggctgttggggtgtgctggggttggtacccgagcgccttcccctcacctcaaccagagaagagcatccggttgctttttaaagcttttagcctgccctancacggacaaagcatgtta

SEQ ID NO: 12 - DNA, 1427 bp, Homo sapiens
  misc feature (1395): n equals a,t,g, or c
  misc feature (1402): n equals a,t,g, or c
  misc feature (1407): n equals a,t,g, or c
ctagttcttcctctccacgcggttgagaagaccggtcggcctgggcaacctgcgctgaagatgccgggaaaactccgtagtgacgctggtttggaatcagacaccgcaatgaaaaaaggggagacactgcgaaagcaaaccgaggagaaagagaaaaaagagaagccaaaatctgataagactgaagagatagcagaagaggaagaaactgttttccccaaagctaaacaagttaaaaagaaagcagagccttctgaagttgacatgaattctcctaaatccaaaaaggcaaaaaagaaagaggagccatctcaaaatgacatttctcctaaaaccaaaagtttgagaaagaaaaaggagcccattgaaaagaaagtggtttcttctaaaaccaaaaaagtgacaaaaaatgaggagccttctgaggaagaaatagatgctcctaagcccaagaagatgaagaaagaaaaggaaatgaatggagaaactagagagaaaagccccaaactgaagaatggatttcctcatcctgaaccggactgtaaccccagtgaagctgccagtgaagaaagtaacagtgagatagagcaggaaatacctgtggaacaaaaagaaggcgctttctctaattttcccatatctgaagaaactattaaacttctcaaaggccgaggagtgaccttcctatttcctatacaagcaaagacattccatcatgtttacagcgggaaggacttaattgcacaggcacggacaggaactgggaagacattctcctttgccatccctttgattgagaaacttcatggggaactgcaagacaggaagagaggccgtgcccctcaggtactggttcttgcacctacaagagagttggcaaatcaagtaagcaaagacttcagtgacatcacaaaaaagctgtcagtggcttgtttttatggtggaactccctatggaggtcaatttgaacgcatgaggaatgggattgatatcctggttggaacaccaggtcgtatcaaagaccacatacagaatggcaaactagatctcaccaaacttaagcatgttgtcctggatgaagtggaccagatgttggatatgggatttgctgatcaagtggaagagattttaagtgtggcatacaagaaagattctgaagacaatccccaaacattgcttttttctgcaacttgccctcattgggtatttaatgttgccaagaaatacatgaaatctacatatgaacaggtggacctgattggtaaaaagactcagaaaacggcaataactgtggagcatctggctattaagtgccactggactcagagggcagcagttattggggatgtcatccgagtatatagtggtcatcaaggacgcactatcatcttttgngaaaccnagaangaagcccaggagctgtccca

SEQ ID NO: 13 - DNA, 3548 bp, Homo sapiens
  misc feature (346): n equals a,t,g, or c
  misc feature (389): n equals a,t,g, or c
  misc feature (1103): n equals a,t,g, or c
ggcacgaggcaaaatgggcccgggaagaagaagaagcccagcgtcgattagaggagaaccggctgcggatggaagaggaggcagccagactccggcatgaggaagaagaacggaagagaaaggcgctggaggtccagcggcagaaggagttaatgcgccagaggcagcagcagcaagaggctctccggaggttgcagcagcagcagcagcaacaacagctggcgcagatgaagcttccttcttcttcaacgtggggccagcagtccaatacaacagcatgtcagtcccaggccacgctgtcgttggctgaaatccaaaaactagaggaagaacgagaacggcagcntcgagaagagcaaaggcgccagcagagggagttgatgaaagcncttcagcagcagcagcarcagcaacagcagaaactctcaggttgggggaatgtcagcaaaccttcaggtaccacgaaatctcttctggagatccagcaggaagaggccaggcaaatgcaaaagcagcagcagcagcagcagcaacaccagcaaccaaacagagctcgtaacaatacgcattccaacctgcacaccagcattgggaattctgtttggggctctataaatactggtcctcctaaccagtgggcatctgacctagtcagtagtatttggagtaatgctgacactaaaaactccaacatgggattctgggatgatgcagtgaaagaggtgggacctaggaattcaacaaataaaaataaaaacaacgccatctcagtaaatctgtaggtgtgtctaaccggcagaataagaaagtagaagaagaagaaaagttgctgaagctctttcagggagtaaataaagcccaagatggatttacgcagtggtgtgaacagatgcttcatgcccttaatacggcaaataacttggatgttcccacatttgtttctttcctgaaagaagtagaatctccttatgaggtccatgattatatcagggcctatttaggagatacttctgaggccaaggagtttgccaagcagttccttgagcgccgtgccaaacagaaagccaaccagcagcgtcasagcmaggcagctgccggcagcngagcagcagccrccacagcagccgycacagcagccacaacagcaggaytctgtgtgggggatgaaccacagtacactccattcagtatttcagcagctagagaaggccaaagctgcaaagctagagcaagagagaagagaggcagaaatgagggcaaaacgggaagaggaagagcgaaagaggcaggaagawctccgaagacaacaggaggaaattcttcggcgacagcaggaagaagaaaggaaawggcgagaggaagaagaacttgcccgaaggaaacaggaagaggctctgcgtcgccagcgggagcaagaaattgcattaaggcgacagcgagaagaggaagaaagacagcagcaagaagaagctcttagaagactggaagagaggagaagagaagaggaagaaaggcggaagcaggaagaattgttackcaaacaggaakaggaggctgcaaaatgggcccgggaagaagaagaascccagcgtcgattagaggagaaccggctgccggatggaagaggaggcakccagactccggcawgaagaagaaaaagcagaagatggtccgagcagatcccagtttattaggattttcagtcaatgcatcatcggagcgactcaacatgggtgaaatcgagacgttggatgactactgagcacctgccagtggactggccatccctctcctgtctgccgactatggagtctccacctttggacacaacacttactcaccatttactctttatcactctgcaacaaatcacagaaccgatcatctcaggctttttcttctggccctttgtgtccaagattctttaatccatttttgttggtgaacatctcagactatagataagtggactggaccctgtgtcttgggggtggcagttgggattactccccaacaaggctgattttaggcagcatgtgttcactgtgctgtgatttcatctactgtctcccagaaagtgtgttgggatcggccattagcagcttgctttctcttgtcacttttttwcttctattttgttttttcttcttctttttccccccatcagggcaaatggtctaactggtgcaatcatgaagagagttaatggttaacagacattggccaataacaaaacaccccatggactgtgactcgagtatccaacaggcagtcagagctctcccggtctgaaagttgcattgccactgctaactttgggattgcatcagagaggccctgagtggggttgagatgaggttggtttggtttgatgttacacactcctcacctgttctttctgagtgtcctttctctgaaaggatttatgtttttcttcgttagatagtgacttctgagcaagctgatctcccctggcatgctccaacctgattggacaaaggaagctctatggcctgggagagagactattcttaatttttctttcttacaaaaactgatttttcccataaatatttttacttcagaggactaggaccattttgttttgggcccttctgctgaaaatttgtctcgtttaagaggcagctagaatctttaccatatgtatgaatttgtataatttcatttttggatagggataaacttttgcttctgataaaagcctggaatttcatctggtcctcagagcattgcgtgtgtgtcttgctgtagcccggaaaaggttttgtgtaaagattctgggatggcaagttgtttgccttttctgaaaagagaacatacagaacctgtccatctttaagaccttcatccatggaatctactatacaggaggatgcagtgggctggaggggatgggcgaaaatgggagcaggaagcctggcctggcttctggtcatggcctcctaaaaccttaaacttcaagtagaaatgtactcaagccctatttataaacaaatacttttcctgcctccaccaaacccctacagaacatcacctggaattgccactcacactgggttggagtcattgggcagctgtgcctgtgcgagaggtgctgtggtctgggcagcccctggaaaagcacctttgctgcctgtcattgttgcctgaagaaggctggagttgctctgagagcagtttgggtttggagtattatatttggcttctatttttattattttggatcaccattctccctatcccttcttgcctccctcccttctaaacatgtgtaataactatacagagactgctacaaaattgtatatagtttttggatcaaatagcatgaggggagaggaaaccattaaaaattggggctcctactctcctttgctttgtaaattcaaaagttgggggtgggtaagagggatagttaaaatgtttacaaaactttaggctccctcggaacttttgccagtgtggaggaaaataaaaaagaacttaaataaaatctgattgtattctaaaaaaaaaaaaaaaaaaaa

SEQ ID NO: 14 - DNA, 466 bp, Homo sapiens
  misc feature (95): n equals a,t,g, or c
  misc feature (433): n equals a,t,g, or c
catcgtgtatgttccttctcacctccatcatatgcyctttgaactatttaasaatgcaatgcgggcaacagttgaacaccaggaaaatcagcctncccttacaccaatagaggttattgttgccttgggaaaagaagaccttaccattaagatttcagacagaggaggtggtgttcccctgagaattattgaccgcctctttagttatacatactccactgcaccaacgcctgtgatggataattcccggaatgctcctttggctggttttggttacggcttgccaatttctcgtctgtatgcaaagtactttcaaggaratctgaatctctactctttawcaggatatggaacagatgctatcatctacttaaaggctttggttackkcttgccaatttctcgtctgtatgcaaagtactttcaaggagatntgaatctctactccatatcctgataaagcttta

SEQ ID NO: 15 - DNA, 864 bp, Homo sapiens
  misc feature (835): n equals a,t,g, or c
  misc feature (847): n equals a,t,g, or c
ccacgcgtccgcggacgcgtgggctctggcgtcctggatggaggtgcgttcctttctgtggctggcgctggatccaccctgggtctccaaccagggctgcagagagggtagagccgtttcttaggccagagtggagtgggacaggaggtgccgagagaggactgaggtggcttgggacatggaagcgctgcagccttcgagcccggcatccagcattgcagccgccgcggcggcctaagagctcgaaccctttcacacgcgcgcaggaggaggagcggcggcggcagaacaagacgaccctcacttacgtggccgctgtcgccgtgggcatgctgggggcgtcctacgctgccgtacccctttatcggctctattgccagactactggacttggaggatcagcagttgcaggtcatgcctcagacaagattgaaaacatggtgcctgttaaagatcgaatcattaaaattagctttaatgcagatgtgcatgcaagtctccagtggaactttagacctcagcaaacagaaatatatgtggtgccaggagagactgcactggcgttttacagagctaagaatcctactgacaaaccagtaattggaatttctacatacaatattgttccatttgaagctggacagtatttcaataaaatacagtgcttctgttttgaagaacaaaggcttaatccccaagaggaagtaggatatgccagtgtttttctacattgatcctgaatttgctgaagatccaaggaatgattaaagttgrtcttatcactctttctttacacttttttttgarggcaagggagggggcaccagttgcccgnttcccggggttntaatttgaaggttcagg

SEQ ID NO: 16 - DNA, 2805 bp, Homo sapiens
  misc feature (11): n equals a,t,g, or c
  misc feature (31): n equals a,t,g, or c
  misc feature (37): n equals a,t,g, or c
  misc feature (48): n equals a,t,g, or c
gagggttggtngtgacactgctcacacattnattttngataaacagcnccaacttctgcacctcagcaaaggatgcctttgtcattctggtggagaatgctttgcgagtggctaccatcaacacagtaggagattttatgttattccttggcaaggtgctgatagtctgcagcacaggtttagctgggattatgctgctcaactaccagcaggactacacagtatgggtgctgcctctgatcatcgtctgcctctttgctttcctagtcgctcattgcttcctgtctatttatgaaatggtagtggatgtattattcttgtgttttgccattgatacaaaatacaatgatgggagccctggcagagaattctatatggataaagtgctgatggagtttgtggaaaacagtaggaaagcaatgaaagaagctggtaagggaggcgtcgctgattccagagagctaaaccgatgcttcgggagcaagttctgcttgaacctagccgacggttatggaaacccattgacattccaaaacaatatatacacacacacataaatcagccaaaatcagagaaaaggaacagggatttaataccttttttatgcttatttttgtcaaacatgtactcctttcatacgggtggcttttacaaggcaacttccgtcatttaatgttttcaactgtaattgtcttaatggaaatgttaaaattcatatctgattaacatttttaataacttagaggagattttaactttatttaaaaataggtaaaattattgtacctaattatgtctaaagtttattcaggggtaatttccctgatgtctgtataaaatcaagatcttattttactgatgcataagtcctagtgggtcaagactaggcatatgctttcagataaataaggaattactccaatcagttttccccaatcaaagaagccatgtcattttacttttagaaacatacaattgggcccaatatgggaattttcataatagttcatacatttgtcagccaacattaaaaggtaaccaactcctcaggtatttgtagtttaccctaacgsttctttaaaagaaagtaggtaaaaaaagaaaagggtagataatctttcgtatgcaaacttttcccttatattttgtctttctttcctttttgactttagtagcatcctccacacatttgtgtgcctgatttgaaaggaagctggggcacccagcgagtttagcctttaagtttctgtgtattgatttgcagattaagtaatgctgagaggaataaagaagggacagaaacatggaacataaagcattgaaaattccggtgcttgggcttcggcttcagagtaacgtcagtggcttagggttaaacggccattttattcaaatgcttgctatacaatctgaaaacacactggcaggtgctcctctccttggcaattcattgagtatccagagttctacgatgtttaactgaagaattggctaatgttttgatcctccagtgtgactgttgtttttgtttgggggtgggtttggggttttttgcttttttattcctgaagcttaccagatatgaatggctaatactccattgttctgcttgttgtaatggtgaatgctttaagaaaaaaaagtgtaatttgctaagaataattcatgatctgtttatgcgataactcctttttgttacaatttttttaaaaaaagctatttttgttaatgtaaagtaaatatttcagagcaaattttttaaacttattgcactaaatacaggctctgtacaaaaaaaaaaaaaaaaaaaaagcctcagcattttatcattccatggaaggagaatcttttgaaagaaagcattgcctcctaccagaactagacagtgaattagatcggtattatggaaatgcatacaagtaatgtcactagggcttaataagcagccgtttgctaatgtgcttcctttcaaagggttggacctttaaattgctgcaaaaggtaaattgtatttttttttaagtattggtgttctttactctagctaggctaaaatttgctaaatgccttggtttcttttaaaagttcatgtaatatttctgatttttcagaatatttgcaataagagtctggattttaaaaaacacatgcatacacacaattaagagctcatgtcttagcaagatctgggaaaccaacattgcgagagtagctattttgaaagaataattctccagaagttaacatctaatatctagtatcaccaaacagtatcgctgttctcttttattcatttgaaatgaatataattatataactaacaattgtccaaatagatgagagagcaaatcatgtgagaaaattcagaataccatctgtttcatagccgcacagattttggactttcacaaacattgggaactaaatttagaattggcaaaagtctagaagatgggtatcaaaacagaagacattccaggagctagcaattttaagaggtgtccctccaaagtgacctgatggaagtcctgaacttggaaattaggttctactcacttggacatccctgcatcatggactgttgctgctccctgttccatatgctcgcaatctcagctatttggaagctaccaggaatgctttctaattatcatttgcaactagaactgtaatcagaaagaaattttgtatttttgtataacttgattgtgtgccattttatataacaggtcctgttttacaaataaattttgttttactaamaaaaaaaaaaaaaaaaaaaaaaaaaaaagggtggggggaaaa

SEQ ID NO: 17 - DNA, 710 bp, Homo sapiens
  misc feature (21): n equals a,t,g, or c
  misc feature (608): n equals a,t,g, or c
ggcggctacacgtcgcctgtnagtctgtgaagcctaccccgggcgtgggccgcagcgtcgagtaacgtcattcgaaccccgtcgcgcccctttgtgcgtcacgggtggcgggcgcgggaaggggatttggattgttgcgcctctgctctgaagaaagtgctgtctggctccaactccagttctttcccctgagcagcgcctggaacctaacccttcccactctgtcaccttctcgatcccgccggcgctttagagccgcagtccagtcttggatccttcagagcctcagccactagctgcgatgcatgtgatcaagcgagatggccgccaagaacgagtcatgtttgacaaaattacatctcgaatccagaagctttgttatggactcaatatggattttgttgatcctgctcagatcaccatgaaagtaatccaaggcttgtacagtggggtcaccacagtggaactagatactttggctgctgaaacagctgcaaccttgactactaagcaccctgactatgctatcctggcagccaggatcgctgtctctaacttgcacaaagaaacaaagaaagtgttcagtgatgtgatggaagacctctatnaactacataaatccacataatggcaaacactctcccatggtggccaagtcaacattggatattgttctgggccawtaaagwtcgsctggaattctgctgatt

SEQ ID NO: 18 - DNA, 992 bp, Homo sapiens
attttttactttccccacccagcaggatatgctggttcaaggcctaaagtaaaatgatcaataatgtttgtagcattaatgaaatattttcaagaaatgtgtccaggggtagcactggctatgttgacgaggcctttggtaactcagagagctcttggccctgatggggacttgcccttacgctttctttatcaggctctgagttcacacggagcctctggcacttccctgctgtcttgggagaaaggaaactggttgccgcggcaggttgtggaatctgttgctggaaccaggctggaagcccacctggtagtgaacagggcccagtggggcaggctgggcatgttgtggtctatgggtttgtttcctggagaatgttcaggaatgtcttcccagctgctttggtgctgagctctattatctcacagcacgtccagaaggctaacccaggtggggaggatgctgacaccagctccaggtggagttggtggtcttaatttggagatgcaggggcaacctgtgaccctttgaggcaagagccctgcacccagctgtcccgtgcagccgtgggcaggggctgcacacggaggggcaggcgggccagttcagggtccgtgccaggccctcctcagtgccctgtgaaggcctcctgtcctccgtgcggctgggcaccagcaccagggagtttctatggcaaccttagtgattattaaggaacactgtcagttttatgaacatatgctcaaatgaaattctactttaggaggaaaggattggaacagcatgtcacaaggctgttaattaacagagagaccttattggatggagatcacatctgttaaatagaatacctcaactctacgttgttttcttggagataaataatagtttcaagtttttgtttgtttgttttacctaattacctgaaagcaaataccaaaggctgatgtctgtatatggggcaaaaaaaaaaaaawawaaaaaaaaaaaaa

SEQ ID NO: 19 - DNA, 1795 bp, Homo sapiens
acccacgcgtccgcttagcgtcctcaggaagtctgtccttattcttctaaagtttaaactctgaacatcccttttattttacccctggagaggcgagtcagtcccttcccacccctacctactccaactcacatccaaagtaggacaacggtggaagcagaactatagtttccggggagcgactcgagtgcccggagttcattgtaaaacgcaccggaagtgggtccggcggctttctttccgtmgcagagagcatcggccggcgaccgttccggcggccattgcgaaaacttccccacggctactgcgtccacgtggcggtggcgtggggactccctgaaagcagagcggcagggcgcccggaagtcgtgagtcgagtcttcccgggctaatccatgccgggttggaggctgctgacgcaggtcggcgcccaggtgctgggtcgactcggggacggcctgggtgctgccctgggcccggggaacagaacacacatctggctttttgttagaggtcttcatggaaagagtggtacatggtgggatgagcatctttctgaagaaaatgtcccattcattaagcagttggtctctgatgaagataaagcccaattagcaagtaaactgtgtcctctgaaagatgaaccatggcctatacatccttgggaaccaggttcctttagagttggtcttattgccttgaagctgggcatgatgcctttatggaccaaggatggtcaaaagcatgtggtcacattacttcaggtacaagactgtcatgtcttaaaatatacgtcaaaggaaaactgtaatggaaaaatggcaaccctgtctgtaggaggaaaaactgtatcacgttttcgtaaagctacatccatattggaattttaccgggaacttggattgccgccgaaacagacagttaaaatctttaatataacagataatgctgcaattaaaccaggcactcctctttatgctgctcactttcgtccaggacagtatgtggatgtcacagccaaaactattggtaaaggttttcaaggtgtcatgaaaagatggggatttaaaggccagcctgctacgcatggtcaaacgaaaacccacaggagacctggagctgttgcaactggtgatattggcagagtctggcctggaactaaaatgcctggaaaaatgggaaagtgtggagaataaacacaaagcacaacataatctatgtaaatggctctgtacctggacataaaaattgcttagtaaaggtcaaagattctaaactgcctgcatataaggatctcggtaaaaatctaccattccctacatattttcctgatggagatgaagaggaactgccagaagatttgtatgatgaaaacgtgtgtcagcccggtgcgccttctattacatttgcctaacatctttggacgtggcagaaccttacatattctgtgagcttcgatgagccagagtgatatcataaccaccagaaatcatactctcctttcttagtcacaacaaaatcacacatgtcatctttgtcaagggcataaatatatcattcatacccccattaaattttgttagaaaaattaccacattaaatatatgagttaagtagattggatttgctgaaattggtgttgggcatattagcaaaatattcttaatttgtggactcgattcttttttactacatatttcccaagttatcttaagatgtctgtaaatttaacttttattaaagttttgtcaatctttgtgaaaaaaaaaaaaaaaaaaaaaaaaaaaaactcgta

SEQ ID NO: 20 - DNA, 709 bp, Homo sapiens
  misc feature (708): n equals a,t,g, or c
acccacgcgtccgagcaagatggcgccgcgggcatttcttccactgcccgtctgagggaacgctaagtagtgtgtccggcgccgtgttccagctccgcgttgttccgcgagaaagcgagaggccgagcccgggctggtgcgatggccgcggtggtggccaagcgggaagggccgccgttcatcagcgaggcggccgtgcggggcaacgccgccgtcctggattattgccggacctcggtgtcagcgctgtcgggggccacggccggcatcctcggcctcaccggcctctacggcttcatcttctacctgctcgcctccgtcctgctctccctgctcctcattctcaaggcgggaaggaggtggaacaaatatttcaaatcacggagacctctctttacaggaggcctcatcgggggcctcttcacctacgtcctgttctggacgttcctctacggcatggtgcacgtctactgaaatgggggcccgggggacttttttaaaaaaccagatcgggaggactgtggccagcaattaacaccatgtagacttccttagttcttaagtggttgaattcgctgcttgttctgtaacgttataaataatttatatctgaagacggagagcctgtaatattcttcagattaaatgaagcgtgagacamaaaaaaaaaaaaaaaaaaaaaaaaaaaaaaaccccggggggggcccng

SEQ ID NO: 21 - DNA, 649 bp, Homo sapiens
  misc feature (534): n equals a,t,g, or c
  misc feature (596): n equals a,t,g, or c
  misc feature (600): n equals a,t,g, or c
  misc feature (624): n equals a,t,g, or c
gaattcggcacagggaaataatagggaaaatacctatttwatatgatgggggaaaaaaagtaatctttaaactggctggcccagagtttacattctaatttgcattgtgtcagaaacatgaaatgcttccaagcatgacaacttttaaagaaaaatatgatactctcagattttaagggggaaaactgttctctttaaaatatttgtctttaaacagcaactacagaagtggaagtgcttgatatgtwagtwcttccmcttgtgtatattttaatgaatattgatgttaacaagaaggggaaaaaacaaaacacaaggttttttccaattttaatgctggctccatccaaaagtttgcccacaagaatgaataccttcccaaagttgaataaatttttatttataaaactaaggttaaaatttgttggtttgggttcctttttaaaaccacgggcttgcccccttcccacacccccatcctttgctcctaaatgaatcaaaaacattgccttgaaataaactgaagcttagaantatacctccctattatgtccattttaaatttaaggaaaaaggggcgaaaatttaaaactaanggcncaaaattttggtttaaaactccanaatatacatgttaaatcctctgcta

SEQ ID NO: 22 - DNA, 1607 bp, Homo sapiens
  misc feature (820): n equals a,t,g, or c
  misc feature (821): n equals a,t,g, or c
acccacgcgtccgcagccatgccattggcaggaacagcacggagggccgggcccacaccatgtgcatcgagggctcgcagggttgtgagaacccaaagccaagcctcacagatctcgtggttctggaacacgggctgtacgcaggcgatcctgtctccaaagtgctgctgaagccgctcacgggccggacacaccagctgcgcgtgcactgcagtccctgggccaccccgtggtgggcgacctgacctacggagaagtctcgggccgggaggaccggccgttcagaatgatgctgcacgctttctacctgcgcatccccacggacaccgagtgtgtggaggtctgcacgcctgaccccttcctgccctccctggatgcctgctggagcccccacacactgctgcagtcgctggaccagctcgtgcaggccttacgggccacccccgaccctgaccccgaggataggggccccaggccaggcagcccctccgcactcctgcctgggcccggccggcctcctccacccccaaccaagccccctgagactgaggcacagcggggcccctgcctgcagtggctgtcggagtggacgctggaaccggacagctgagagccgtggggctggggcagggggtgtcagctgcacagcgggactctagggagatgggcgagcgagcgtctgctcactggctctggggcctcgaggtgccaggcagcatcaggcccactgggttgccccggccaggcctgcgaggaagggctgaggtggggccggcagggggcgccaggcagccgtgatcacaggtgacgaccgcaccgnngccgtgggactgatgcgggatcccgagggccttcctgcccacatgccccgggagaaaccgaggcccctccctcctcctggaacagcttccggctctcaagcgtcaccccaggggcgtcagttttacggactcaaggtcacctcaggaagaggcagggccaggttttgggataggctttgctccaggatgggctgctcctgggcctggtgagctactgcccccaacctaccctctagaggggctgggaagggccgttctgggctcacctggcctgggagacccatctggtccctgcgtcctctgcccctcactgctctgtgcagatcctgtcgccctcagctgcctcctcccgagacctaatggtccctgctgggctcgagtctgcaggcccggctgcgtgtgccttggcctcactgtaccagtggttccctctctgcccggattctgagctcagtgtggtgtttggtgcacaggggttggtcaggggccatggccaaggccctgccacgcacgcccatccctcagatccactgtgagcaccaacctgctgcagtctcttgggcccctgctggcagctctgccacgtcaccgcctgcctggctcccacacagccatgcattgtcactctgcctccgggaccccagcttgggagctgtgggtctgccaggtcccacctcctctgtcccccatgccacaacctgggctcctggctacagcagggctccagggactccaaataaatgttcagtgactggctccaaaaaaaaaamaaaaaaaaaaaaaaaa

SEQ ID NO: 23 - DNA, 578 bp, Homo sapiens
  misc feature (17): n equals a,t,g, or c
  misc feature (27): n equals a,t,g, or c
  misc feature (528): n equals a,t,g, or c
ggatacggctgcgagangacgacaganggggggggcgcggcgccggggattgggagggcttcttgcaggctgctgggctggggctaagggctgctcagtttccttcagcggggcactgggaagcgccatggcactgcagggcatctcggtcrtggagctgtccggcctggccccgggcccgttctgtgctatggtcctggctgacttcggggcgcgtgtggtacgcgtggaccggcccggctcccgctacgacgtgagccgcttgggccggggcaagcgctcgctagtgctggacctgaagcagccgcggggagccgcgtgctgcgctactgtgcaagcggtcggatgtgctgctggagcccttccgccgcggtgtcatggagaaactccagctgggcccagagattctgcagcgggaaaatccaaggcttatttatrccargytgagtggatttggccartcaggaaagcttctgccggttagctggccacgatatcaactatttggcttttgttcaggtggaaggnaccagcatatttaaagttcttttctgtgggaaaattcagaaattcgagtt

SEQ ID NO: 24 - DNA, 2756 bp, Homo sapiens
  misc feature (20): n equals a,t,g, or c
  misc feature (109): n equals a,t,g, or c
  misc feature (249): n equals a,t,g, or c
attcggcacagctcggccgnagggttgagcagacagcctgcattctaacataccctgttcccaccccacggccattcagactgcactcaatacgctgaagtcgcttttnttgttgttgttgttgtttgcatcatttggatttttttcctgctttcaataccaaaaaaatgcagatgctttaagggctaaacagaattctgaagaatttaaaatatgcaattaaagtttgatatgttttgtctcccaagnaccttgttttttgttgttgttgttgttgttgaagtcagctgattttctctttagaaagagggtcagctagaaacctaggttttttggaattgtaaatttttttttagtatagtctggagagaaaggtcattcaaaaggaaagtacaatgggacttgctgcccttcatcatctcgttcccgtgccaggtgtgtgttggtcacgtaaaagcctgggaagcatcagaggagtcccggattgctgctgctacctggagacagggttagcaaaataacactagtgatgagggagaggcttcttttcaccataagcctgctgtgtacaccgagggcggcaggagaagcatgggaaggagtcagcctaagtttgcacattgcataaagggtacactaaggtatgagctgaagctttaggttctccgtgcttccctcaagacctccttcttgctaacagaagcagtaggcaattgctgcagtgcgtttctcaccctgccaataggtctgtctgtatctctgttaaggaaaatagcctggtccctcctggcagtgcttggaagcttgatgctaatttttatatagcgtggcaaactgaccagcagtgccaggccttgatctgtattctgcactatccctttacttggttcctggcactgaatggtctccagccctgaagaatcacgtgtgatcacagcagctgacctgggctttctccccgagaggaaggggcatgtcatttttatttgacagagggaaaatgggagctgtccttgactgcctttgttgtgctttcccgcgtaagatagcactgtgttttaaactgttgcattacactgtctttgcaatgatgtaaatgtaagaaatcacttagctttaaaagcgcatggtttgatcttatttatatgaagactttttaacatatcaagaattaggtgcattggcaggtagggtttggggtgtgataactgcttcagatggaatgttcacttaagctttgtcttcttaaaaattatcaatgtgaatgtcataattatatatatttttgtggaaaattttctcctaagtataagttattgtgcaaaatatagtgtcattgatgcaaataatagtttaacttttagtttagaactcctaaaagatataaattgtattgcatatgcattaaaagtttgttttatttaattttatgtagatgtgtgaagtgttaggtaaaatttttttcacttatccatttaaacaccttgttacttgaatattgtgttgactggtctgcaacagtgatccattctgtaatatagctcttttaactgggaaggaaccacaccccagttgtgccgattacattagtgttggcacacagtcgggtgctagtgtaacacaaatgccgcgttgtctgggtgtacagtgtttgtggagacgccacttcctcaaaatggtttttkattgtttttaacctataagacgttctgatgctcacaaacctctattcaacacacaaaacaaacatgaaaaggtagttagttgggttgtaacagcttactggggtggactcataaaacagtggctttctgttcatctaaagtttcctcagataccacagaccactgttaagtgtgctcattgtcactttaaatttcaacgataccctatttttgtcattctaaatatcagatgtactattggtataattgcacaccaaaaataagccaaacagtgcattacgctaactggatccctgcttttatgtgagctaaggaaagatggagccaactccaacgagggcctctttttctctcttgtctagcctgtttctaaaccgaatgatccaggattcaagcttctattgtcaagtgaaactttcctcagatggactccaggtagccaggtcacctaaacctagtggtcctgtgcgatgctctttctgccagtccctgaatctctgcagcttctcttacctgtcttacctgtagtaaagcacaattgcagtggcgtcgcattcagaagaagggaaggtcagcagaggctatgcatgttgtgtgatgatgagtgtttacagccaccttctcctaaaacgaaatttataccggggtggatagtattccattaggtagacttatcgactttgctaagtgctttttagacagcttaaaaaattttcaagattttaaaagatgtataaggttaagtttgcaaatataatggaaatgctgtatatcttttgaagtgatgaaatccwcgttggaattttaaagaaaatatgttgtaataatgctgttgtaagtaatattttaatgtctctttgcctgttttctatttcagcacattcattgtggtgaatgttcatagcattataactgcttagccattgaatgataacatttgttagtggaaattggaaaatttatttgtgaaattctgcagaattcatttttctatttccaatatttgctgaggttaaataaaaattttcaagccattgatgtaataaaatatgaaatgaaagcaaaaaaaaa

SEQ ID NO: 25 - DNA, 2680 bp, Homo sapiens
cgggagggcgagcgagagagcaagcaggcagcaggctgccggcgggcgggcggacggcacagagggagggagcgagcgagcagtgagtaagccagcaagggcggtcgggtcccgaggtcagccgagatttctcaggtccctccggccccctccctggagtccacagcgcctccggtgtccagaggatcggacacggcccggcccggccatggcctcgttgctgaaggtggatcaggaagtgaagctcaaggttgattctttcagggagcggatcacaagtgaggcagaagacttggtggcaaattttttcccaaagaagttattagaacttgatagttttctgaaggaaccaatcttaaacatccatgacctaactcagatccactctgacatgaatctcccagtccctgaccccattcttctcaccaatagccatgatggactggatggtcccacttataagaagcgaaggttggatgagtgtgaagaagccttccaaggaaccaaggtgtttgtgatgcccaatgggatgctgaaaagcaaccagcagctggtggacattattgagaaagtgaaacctgagatccggctgttgattgagaaatgtaacacggtcaaaatgtgggtacagctcctgattcccaggatagaagwtggaaacaactttggggtgtccattcaggaggaaacagttgcagagctaagaactgttgagagtgaagctgcatcttatctggaccagatttctagatattatattacaagagccaaattggtttctaaaatagctaaatatccccatgtggaggactatcgccgcaccgtgacagagattgatgagaaagaatatatcagccttcggctcatcatatcagagctgaggaatcaatatgtcactctacatgacatgatcctgaaaaatatcgagaagatcaaacggccccggagcagcaatgcagagactctgtactgaggccagggccagggccaggggactctgtgagtctggctcaagaccgacattgccttggtttgttacatgactatcgtgatggggaaactggctggaaatagtaatcacacctctctgtttttagttagagtctaatgaaactctcatctagttctgtgatgtgtttacctcttttttcaggcctcaggaactcttctatttccttccctaataccccacacccaacctgtcgtaatttctggagaactccaggtttgtgtgtgcaggatgttggcacaaaaatacctgtgttttcattctccccctctctccctcctgtgtcttgcgctttatgttttcttccgtttgataattagttggttaaaagctgagggaaccggaaggaaagtgctaggtgttttttaggaactagggtggcggggggacgaacttctcttcctcacatgaggttactgtttctttcctctgtggggcattggatcctcccacagttgccctggtgatgacttagggcttcccatctgtgtacatcccactttgaatcttgatcgtgacaagaaataccttaggccttcagtcaattccgaagctccttcagttgtttttataatgggcgttttcacatgcacatatgtgtatgcatgtatacgcccatacagacatgcacacacagactcctactccattagctaacataccctccctctccacaacccctgtcacatacctttcaggaggtgacagttgtcttagttgtcatctacccagacaaacgtcctgggcccgtcctccctcctgatactgtagcctcttggtacccagggtgagttggtggagaacagagagatgagaagcagagggcttggggaaagcctgttcctctctgactcagccctttttggcattattgcaagagcttgactcctggttgccttttcccagccagttttcagttggggtgaaggtttctgcaagtgtgaggtccagatgctgctgctcatgttgggctttccttttgggaactatttctctttatttatagtgtcgggcttccggggaaagcaatcattggtgtgtatgtgtatgtgcatgcacacacgtgcatatacacatttgtgtatgtggaaatgtgctgggcaagtcaaaactatagaagagttgcctcctgtctctcgaatcttccagagatatcacttaattgttaacagcttttgtgttaatccccttcagcccctagctcttttattctaccacggctggagagttgatacctgcagtcagcctgccagtgactcttagtgtctgtttctgacttatttttcctgtctctgtcttccaacccccaataatatttccaccggggatgcatcatttttactcccaatattctgtagagagggagtcaggatgctgtcttcccacgaatagtactcagtaacaaaccaattgcattttagttgggcagtgctcccacccaccctccagatcccttccagctaaaacccttcccccttccctccatgtgtttctcagtttcccgtttcgtttgttggactgttccactgcccctcctcctcaccctatcacccatggatcgtaatgtaaaattcttttaccatgtcaagaaattattaaaaatacaggtactttgacctctttctaaaaaaaaaaaaaaaaaaaggggggggggcyaagggggccaagttt

SEQ ID NO: 26 - DNA, 1859 bp, Homo sapiens
gtttcgcctcagaaggctgcctcgctggtccgaattcggtggcgccacgtccgcccgtctccgccttctgcatcgcggcttcggcggcttccacctagacacctaacagtcgcggascggccgcgtcgtgagggggtcggcacggggagtcgggcggtcttgtgcatcttggctacctgtgggtcgaagatgtcggacatcggagactggttcaggagcatcccggcgatcacgcgctattggttcgccgccaccgtcgccgtgcccttggtcggcaaactcggcctcatcagcccggcctacctcttcctctggcccgaagccttcctttatcgctttcagatttggaggccaatcactgccaccttttatttccctgtgggtccaggaactggatttctttatttggtcaatttatatttcttatatcagtattctacgcgacttgaaacaggagcttttgatgggaggccagcagactatttattcatgctcctctttaactggatttgcatcgtgattactggcttagcaatggatatgcagttgctgatgattcctctgatcatgtcagtactttatgtctgggcccagctgaacagagacatgattgtatcattttggtttggaacacgatttaaggcctgctatttaccctgggttatccttggattcaactatatcatcggaggctcggtaatcaatgagcttattggaaatctggttggacatctttattttttcctaatgttcagatacccaatggacttgggaggaagaaattttctatccacacctcagtttttgtaccgctggctgcccagtaggagaggaggagtatcaggatttggtgtgccccctgctagcatgaggcgagctgctgatcagaatggcggargcgggagacacaactggggccagggctttcgacttggagaccagtgaaggggcggcctcgggcagccgctcctctcaagccacatttcctcccagtgctgggtgcrcttaacaactgcgttctggctaacactgttggacctgacccacactgaatgtagtctttcagtacgagacaaagtttcttaaatcccgaagaaaaatataagtgttccacaagtttcacgattctcattcaagtccttactgctgtgaagaacaaataccaactgtgcaaattgcaaaactgactacattttttggtgtcttctcttctcccctttccgtctgaataatgggttttagcgggtcctagtctgctggcattgagctggggctgggtcaccaaacccttcccaaaaggacccttatctctttcttgcacacatgcctctctcccacttttcccaacccccacatttgcaactagaagaggttgcccataaaattgctctgcccttgacaggttctgttatttattgacttttgccaaggcttggtcacaacaatcatattcacgtaattttccccctttggtggcagaactgtagcaatagggggagaagacaagcagcggatgaagcgttttctcagcttttggaattgcttcgacctgacatccgttgtaaccgtttgccacttcttcagatatttttataaaaaagtaccactgagtcagtgagggccacagattggtattaatgagatacgawggttstgtggtgywgtttaagattaagaggcatacaccacttagtaaactaatgaaagcctattgtgaacgacagggattgtcaatgaggcagatcagattccgatttgacgggcaaccaatcaatgaaacagacacacctgcacagttggaaatggaggatgaagatacaattgatgtgttccaacagcagacgggaggtgtctactga

SEQ ID NO: 27 - DNA, 634 bp, Homo sapiens
  misc feature (525): n equals a,t,g, or c
  misc feature (561): n equals a,t,g, or c
  misc feature (629): n equals a,t,g, or c
gcacacatcagttccaggccccattccattctctgaacatcttctgacacactgacagtgctgagcagagcaaggttgggttcgctcctctggcagaacctcggctctcaggaggtccttgttccagggaacagctgcttctctggggctgggctctactccctgcagcccctcgcactacccagctggaaccagggacaacgcctgagtccaaccctcgtgtctattttccagaaaacgggcaatgctgtgagagccattggaagactgtcctctatggcaatgatctcagggctcagtggcaggaaatcctcaacagggtcaccaaccagcccgctcaatgcagaaaaactagaatctgaagaagatgtgtcccaagctttccttgaggctgttgctgaggaaaagcctcatgtaaaaccctatttctctaagaccattcgcgatttagaagttgtggagggaagtgctgctagatttgactgcaagattgaaggatacccagaccccgaggttgtctggttncaaagatggaccagttcaatcagggagtcccgccantttccagatagaytacgwtgaggacgggracygytctttaattattagtgatgtttccggggatgacnatgcc

SEQ ID NO: 28 - DNA, 1632 bp, Homo sapiens
  misc feature (926): n equals a,t,g, or c
cacggcgcgggtgagtcagaacccagcagccgtgtaccccgcagagccgccagccccgggcatgttccgagacttcggggaacccggcccgagctccgggaacggcggcgggtacggcggccccgcgcacccccggccgcagcgcaggcagcccagcagaagttccacctggtgccaagcatcaacaccatgagtggcagtcaggagctgcagtggatggtacagcctcatttcctggggcccagcagttaccccaggcctctgacctaccctcagtacagccccccacarccccggccaggagtcatccgggccctggggccgcctccaggggtacgtcgaaggccttgtgaacagatcagcccggaggaagaggagcgccgccgagtaaggcgcgagcggaacaagctggctgcggccaagtgcaggaaccggaggaaggaactgaccgacttcctgcaggcggagactgacaaactggaagatgagaaatctgggctgcagcgagagattgaggagctgcagaagcagaaggagcgcctagagctggtgctggaagcccaccgacccatctgcaaaatcccggaaggagccaaggagggggacacaggcagtaccagtggcaccagcagcccaccagccccctgccgccctgtaccttgtatctccctttccccagggcctgtgcttgaacctgaggcactgcacacccccacactcatgaccacaccctccctaactcctttcacccccagcctggtcttcacctaccccagcactcctgagccttgtgcctcagctcatcgcaagagtagcagcagcagcggagacccatcctctgacccccttggctctccaaccctyctcgctttgtgaggcgcctgagccctactycctgcagatgccaccctagccaatgtctyctncccttcccccaccggtccagctggcctggacagtatyccacatycaactycagcaacttcttytccatccctctaatgagactgaccatattgtgcttcacagtagagccagcttggggccaccaaagctgcccactgkttctcttgagctggcctctctagcacaatttgcactaaatcagagacaaaatatttcccatttgtgccagaggaatcctggcagcccagagactttgtagatccttagaggtcctctggagccctaaccccttccagatcactgccacactctccatcaccctcttcctgtgatccacccaaccctatctcctgacagaaggtgccactttacccacctagaacactaactcaccagccccactgccagcagcagcaggtgattggaccaggccattctgccgccccctcctgaaccgcacagctcaggagggcsccttggcttctgtgatgagctgatctgcggatctcagctttgagaagccttcagctccagggaatccaagcctccacagcgagggcagctgctatttattttcctaaagagagtatttttatacaaacctaccaaaatggaataaaaggcttgaagctgtggcctgagtgcctcactggacccagaggccaatgggagagtatttggagccctaggtcccagccttagctctacagactcactgcaaaaaaa

SEQ ID NO: 29 - DNA, 2539 bp, Homo sapiens
  misc feature (105): n equals a,t,g, or c
  misc feature (936): n equals a,t,g, or c
  misc feature (951): n equals a,t,g, or c
ggaagaagagaagaaagacagtggtgttgcttcaacagaagatagttcctcatcacatataactgcagcagccattgctgccaagaagcatccattctacaccantcctgctgttgtcatggcacacggtgaacagcccatccctggtctcatcaattattcccatcattcaacagatgaacggrttccagactccatcatttctcgtggtgttcaggtgctcccacgagacacagcctccctcagcactactccttcagaatcgcctcgtgctcaggctacatctcgcctctctacagcttcctgcccaacaccaaaagtccagtccaggtgcagcagcaaggagaacattctcagagccagwcacagtgctgtcgatatcaccaaggtggctagaagacatcgcatgtytccttttcctctgacatctatggacaaagcctttatcacagtcctggagatgactccggtgcttgggacagaaatcatcaattaccgagatggaatggggcgagtccttgctcaagatgtatatgcaaaagacaatttaccccccttcccagcatcagtaaaagatggctatgctgtccgagctgctgatggcccaggagatcgtttcatcattggggaatcccaagctggtgaacagccaactcagacagtaatgccaggacaagtcatgcgggttacaacaggtgctccaataccctgcggtgctgatgcagtagtacaagtggaagataccgaacttatcagggaatcagatgatggcactgaagaacttgaagtgcgaattctggtgcaagctcggccaggccaagatatcagacccatcggccatgacattaaaagaggggaatgtgttttggccaaaggaacccacatgggcccctcagagattggtcttctggcaactgtaggtgtcacagaggttgnaakttaataagtttnccagtggttgcagtcatgtcaacagggaatgagctgctaaatcctgaagatgacctcttaccagggaagattcgagacagcaatcgttcaactcttctagcaacaattcaggaacatggttaccccacgatcaacttgggtattgtargagacaacccagatgacttactcaatgccttgaatgagggtatcagtcgtgctgatgtcatcatcacatcagggggtgtatccatgggggaaaaggactatstcaagcaggtgctgggacattgatcttcatgctcagatccattttggcagggtttttatgaaaccaggcttgccaacaacatttgcaactttggatattgatggtgtaagaaaaataatctttgcactacctgggaatcctgtatcggctgtggtcacctgcaatctctttgttgtgcctgcactgaggaaaatgcagggcatcttggatcctcggccaaccatcatcaaagcaaggttatcatgtgatgtaaaacttgatcctcgtccagaataccatcggtgtatactaacttggcatcaccaagaaccactaccttgggcacagagtacaggtaatcaaatgagcagccgtctgatgagcatgcgcagtgccaatggattgttgatgctacctccaaagacagaacagtacgtggagctccacaaaggcgaggtggtggatgtcatggtcattggacggctatgatggtcaccagcaggagaaagctttgatgcatgtccacatatcattgactgtatcctgtaatatgcaacggcacagctagttttcccgatttggataaaagttgatctgtatagtcaacatcttgaactatatttcaaatgaatttaaatatcttttaaagaaaaaaacacctaaaaataaatcttaacagaaaattctgttctgattatatcaaggcaaatttttcctttcttgcaaattgctttgtgtgttcaatgctaggtctgatagcgatagyttttagtagacagcggtaggtgcctgcagaacttgtgtttttctcatctttaaaatacaactacttatgctcttaaatcaaggctgtctgcttatttatactagcgtaggcaacacttggatttcccttcttagtatgcttcataactgctttacagagagcttttgcttgktctttctcatgtatctcgtgtttatgtgcacagtgccaaaagaagactgactgggtggagctctgccttgcctcaagaaccatcccctgcagagcatccagggaggtttctcgccccaaatwcstcacggcacagtactcttgggcagtaactggacaccttttatttgaagaaacaaactgaagaaaaaatgcttccttaagtgctgacagcctttttaaccaatacatttaaaattgtacagaacaaaaaaataaaatcaaagactgatcttgtacagatattagtgttaccagcattcatgtggaaatcaagagcaaagacaaaataatgttaaacaattctgtaccataacattttctgtaatgatactgaaacttaatgaataaaaaaattccttgatcattatttaaaaaaaaaa

SEQ ID NO: 30 - DNA, 494 bp, Homo sapiens
gtcttctagaggtagagtcgagtgtatctgagagtgcttctctcttagaataaatgacattaacatatgaaaaaacagctacttgtgcctgactatgggcattttcatgtacasgagttcttgaagctgagtttattgagaatggttttgttacctgctgatagctatctttttgtgtttagttctttttgacttctttggcctctaatgttttgacagtggcacttagatgacagtcagcaattgcaacagtgaatgaaatcacacagcttgagttcaaggtggaaagagaaaaaaatctagagaggatgttatctgacctggcatgagaggtgatcatcctgtctctgagcagtgggttcttgctctcgaccttagggtgtaatgtggccctgctccttgtatggtgaataacttgtgactgctgtgtttaccacatggsttgrcagttkacaaagcactttgkgkatatattgcacactctgcatccttac

SEQ ID NO: 31 - DNA, 1263 bp, Homo sapiens
taaatgatgttttggttaagagtggaccatgagaattagctgacagcatcccctttctctctccctgccttggtgggaccctcctgtgtgaccttggcaagtctcgaacttttgtccgtatttaagatggagctgttttacctacttcataagacagttgcgaggtgccattgattcttgactgcaaaataccttgaaacccttatataaagactgaagkcaacggagcctagtgaaagacttactttgtggcttgtggttgaaagtcacatcaaaagacaaatgtggccacgttcaggaattggagacttactggcatggctctacagctgctcagttattaatcatgcagactaacctgtcaacactgggagatgcaacatagcaaaaggacagagaaattagaattttttgtgcagaaagccctaaattcccacctgaatgtaacttacagctcccttacctactctcacacatgccctcaaacatgctagattggcttatacataggccaacacaaaatacaaacgtgacgtgttcatgtagcctagtggctatatgcctattctccatgtaccctgcatggtagtgctgcaaactttaaagtacatttctttcacagcagtattttttttcataagtggcatataaatctcattcaatgaaatgsggaaatcacgttgagaagttggtctgtcatctcccattgagcaaagactggcaggagataataaaaataaatatgggcacacatgtattaatatacagcacgcatttacaagtttattttccagataaaattgtgctataagaacagctctaccaagacagtctgcaccatttccaagtctcagttaatttacagcaactgctgctttcggagatggctgtgaaaatatggaagttcctctcaagtaggcccaagaaacagttctagattttactaagttttattttgtcaggttttttaaattttttcagtgagcgtggtgactgcagaggttagtgctgtgaaaagctgggctaaatattctttctgtaaagtcaaacaggattccatcccctgtgaaataacacaaaatttcactctctaaaagcaacagcatgtaaactagaatgaaagaaggaaattatgtacgtatgcctaatattctttgtgaatgtctttcatttaactaaaattatattagaaaccagattgataaataaaaaattcaaagtagttttaattatcctaaaaaaaaaaaaaaaaaaaaaagtttt

SEQ ID NO: 32 - DNA, 337 bp, Homo sapiens
  misc feature (337): n equals a,t,g, or c
ggcacgaggcaaaaatgaaaacaaggcagcagcatcagacctatctttagattgttttttttttctctctcttttacaagtgtcagtttaattccagagccctggcccagtattttctgatgattttctccccaaggaagagaaggaaatccctgctggttacacagctgcgatgtcagacttcctctgaaacatgcactgttgctgcctattagcataacttcagtctctcattctctcctgactgattagtgatctgcaggcagtttaaaaaacatactttggaggggccgggcgtggtggctcacgcctataatcccagcactttgggaggctn

SEQ ID NO: 33 - DNA, 1742 bp, Homo sapiens
  misc feature (9): n equals a,t,g, or c
  misc feature (17): n equals a,t,g, or c
  misc feature (1576): n equals a,t,g, or c
  misc feature (1578): n equals a,t,g, or c
  misc feature (1621): n equals a,t,g, or c
  misc feature (1724): n equals a,t,g, or c
  misc feature (1733): n equals a,t,g, or c
gtggggggnaggggganaaggccaagactggggwagaattttaaagattcaacactggtgtacatatgtccgctgggtgagttgacctgtggcctcgcacagtgattctgggccctttatgcttgctgtctctcagaattgttttcttaccttttaatgtaatgacgagtgtgcttcagtttgtttagcaaaaccactctcttgaatcacgttaacttttgagattaaaaaaaaaaacgccatagcacagctgtctttatgcaagcaagagcacatctactccagcatgatctgtcatctaaagacttgaaaacaaaaaacagttacttatagtcaatgggtaagcagagtctgaatttatactaatcaagacaaacctttgaaaggttacactaagtacagaacttttaaaccttgctttgtatgagttgtactttttgaacataagctgcacttttattttctaatgcagaggatgaataagttaaatacatgctttgaggatagaagcagatgttctgtttggcaccacgttataatctgcttattttacaatatacacgtttccctaagaaatcatggcagagatgtgagggcagaatatacacaacagatgctgaaggagaaggagggtagtgttttgcaaaagaaaaagaaaagaaccaacagaattttaactctattaacttttccaaattttcctatgcttttagttaacatcattattgtatcctaatgccactaggggagagagcttttgactctgttgggttttatttgaatgtgtgcataacagtaatgagatctggaaacacctattttttggggaaaaaggtttgttggtctccttcctgtgttcctacraaactcccactctcaggtgcaagagttatgtagaaggaaagggagctgaaataggaacagaaaaatcaacccctataactagtgaacaccaagggaaaataccacaatgatttcagaggagactctgcaaaatcgtcccttgtggagaatgcaggcaacatggaatactacgaatgaaatcacatcactgtatcttttacatcaatagcctcaccactaatatatcttgtatctaggtgtctataatggctgaaaccactacatccatctatgccatttacctgaaaacttaactgtggcctttatgaggccagaaaagtgaactgagttttcgtagttaagacctcaaatgaggggagtcagcagtgatcatgggggaaatgtttacattttttttttcttcagaagtaacgctttctgatgattttatctgatatttaaaacagggagctatggtgcactctagtttatacttgcgctctgaaatgtgtaaacatagggtgcctacctatttcacctgacccatactcgtttctgattcagaatcagtgtgggctcctgcagtgggcgcgggtcacggctgactccaacttccaatacaacagccatcactagcacagtgtttttttgtttaaccaacgtagttgtwattagtagttctataaagagaactgcttttaacattaggggactggggagcagtccatggggntnaaaaagggaagtgttttctcacgrggaaaacatgtycaggganaawtaaaggaacactttctaccyctgtttccaggatttttgaaacacttwtttttaaacccaatttttaatttcygtgttcccaaaataggttttttaggggncatctgttncttccccta

SEQ ID NO: 34 - DNA, 1166 bp, Homo sapiens
  misc feature (965): n equals a,t,g, or c
  misc feature (1090): n equals a,t,g, or c
  misc feature (1094): n equals a,t,g, or c
ccggaatgaaaacaaacggcggccgctgccgagtccgggcactctgctggtcgcggcgggagtggcgtggcgcagggatggcacaaaagaaatatcttcaagcaaaattgacccagtttttaagggaagacaggattcaactttggaaacctccatatacagatgaaaataaaaaagttggtttggcattaaaggaccttgctaagcagtactctgacagactagaatgctgtgaaaatgaagtagaaaaggtaatagaagaaatacgttgcaaggcaattgagcgtggaacaggaaatgacaattatagaacaacgggaattgctacaatcgaggtgtttttaccaccaagactaaaaaaagataggaaaaacttgttggagacccgattgcacatcactggcagagaactgaggtccaaaatagctgaaacctttggacttcaagaaaattatatcaaaattgtcataaataagaagcaactacaactagggaaaacccttgaagaacaaggcgtggctcacaatgtgaaagcgatggtgcttgaactaaaacaatctgaagaggacgcgaggaaaaacttccagttagaggaagaggagcaaaatgaggccaaactcaaagaaaaacaaattcagaggaccaagagaggactagaaatactggcaaagagagcagcagagacagtggtggatccagaaatgacaccgtacttagacatagctaaccagacaggcagatcaatcagaattcccccatcagaaagaaaagcccttatgttagctatgggatatcatgagaagggcagagctttcctgaaaagaaaagaatatggaatagccttgccatgtctgttggacgctgacaaatatttctgtgagtgttgcagaragctgctggacacagtggataactacgccgtcctccagctggatatagtgtggtgttamttccgcctggaacanctggaatgccttgatgatgcagaaaaaaaattaaacttggsccagaaatgctttaaaaattgttacggagaaaatcmtcagagactggtccacataaaagtatgttcctgggaattcatcttatnggcncgttgagtccatttctagcatttgtgtttattcctgttaaagtatttgaactactgccagaaggtggatttt

SEQ ID NO: 35 - DNA, 1049 bp, Homo sapiens
  misc feature (17): n equals a,t,g, or c
  misc feature (38): n equals a,t,g, or c
gatgggtgcccccggcngcaggaattcggccagcaggntggtgctggggcttcttctcctgaaggggctgcaagagggaaggcttagccatgtcgtccttgatcagaagggtgatcagcaccgcgaaagccccaggggccattggaccctacagtcaagctgtattagtcgacaggaccatttacatttcaggacagataggcatggacccttcaagtggacagcttgtgtcaggaggggtagcagaagaagctaaacaagctcttaaaaacatgggtgaaattctgaaagctgcaggctgtgacttcactaacgtggtgaaaacaactgttcttctggctgacataaatgacttcaatactgtcaatgaaatctacaaacagtatttcaagagtaattttcctgctagagctgcttaccaagttgctgctttacccaaaggcagccgaattgaaattgaagcagtagctatccaaggaccactgacaacggcatcactataagtgggcccagtgctgtgtagtctggaattgttaacattttaatttttacaattgatgtaacatcttaattaaccttttaattttcacaattgatgacagtgtgagtttgatgaaaatatctgaagctattatggaaataccatgtaatagggagagttgaacatgaatattagagaaggaatccagttacttttttaaattacacctgtgtgcacctgtattactgaatataggaaagagatacccattacatagttactcagtaaacaaaagagaaataccaggtaggaaagaagagttactattcctgagaaataatcaagaacatatttaatttaaactaatgatgtgaactatttagttttgatgtccgttatgtgattctgcttttacttgagtaaaattaaagtgtttaaatttgagatcaaggagaagatagtggaacaaaatgttatatagataatatttttctaatggaaataaaataggcagatttcaaaaaaaaaaaaaaaaaaaaaaaaaaaaaaaaaaaaaaaaaaaactcga

SEQ ID NO: 36 - DNA, 489 bp, Homo sapiens
  misc feature (353): n equals a,t,g, or c
  misc feature (383): n equals a,t,g, or c
  misc feature (385): n equals a,t,g, or c
gtttgttgcctgcttgttttaatgttctggcttgaggcagcgagcccttgactatgccacattgccaggattttgcaggttagattgtactacagcactgcctttggcttgccagactctggagtccccacattttcatcctgttctcaggaaaacactttgacccacttgaagctctgagctactgcttcacagcttcctggggtcagtctccagccaaaaccatagatatcccaamwgcagccaaaccacggctctgggcgaaggaacgattaggtttactstaggtttccacaccctgatgctcctggcctttaatttgacaactctggactgccaggttttcacagacngttggacatggattcaagattgggaatgtnangggatggtttggcaacagtgtttgctttgagcagttttaaaatttggccaggagattcatgtgagcaagaaatgttagataccagttttttggggtcaaggggg

SEQ ID NO: 37 - DNA, 598 bp, Homo sapiens
  misc feature (595): n equals a,t,g, or c
gactcccagagtgctgggatttcaggtgtgagccactatgcccagcctaatacgtggatttttaaagcttcaggttctggttcagaagtttcctgggtctcattaaaataatgaggcactcagaattggtctaataaaaataacgaccatttctttctactccagtctctttcacaaacttcttagtgaaaatgacaagtgaggcccttcagtaggggcattttcagtggagataatagcggcagacctgagaccttgggctaggtagtttattctcatttctgaacagatgatgaattttctcagatgaccctaagaaattgttttaccaaaaacaaagtgatctatttgctttgggaggaactcccttccttttgtttctcttcccttccccccttcccctgcggttgtagagcccgttctgtccggtcgtggttctgtccagccatgatccgggagtcctagcttgctaatggamcacctgagatgttccttatggctcaaggctwaaattgaaggtgggaaccacctgaagcctccgtggggaggccttgsgggaggttwggcctaaargcattaggaagatactagcttnagg

SEQ ID NO: 38 - DNA, 762 bp, Homo sapiens
  misc feature (725): n equals a,t,g, or c
  misc feature (730): n equals a,t,g, or c
gtctttgggaactcaaaaagttatctgtgcattttcatccctccgtggccctttttgcaaagaccatccttcagggaaactatattcagtattcaggggacccactgcaggatttcactctaatgagatttttggatcgatttgtataccgaaatccaaagccccataaaggcaaagaaaacacagatagtgttgtgatgcagccgaaaagaaaacattttattaaggatattcgtcatcttcctgtgaacagtaaggagttccttgcaaaagaagaaagccaaataccagtggatgaagtgtttttccacaggtattataaaaaagttgctgttaaagagaaacaaaaacgggatgcagatgaagaaagtatagaagacgtggatgatgaagaatttgaagagctgattgacacatttgaagatgataactgtttcagctctggaaaggatgatatggattttgctggaaacgtgaaaaagagaacaaaaggagctaaggataacacattagatgaagattcagaaggtagtgatgatgaacttggtaacctggatgacgatgraagtttctttagggaagtatggatgatggaagaatttgctggaagttgatggaagatgggagggaacattycatgggatgtgtttagatggatggaaagtggagagtgtttccagaacttggaagttccactcccaaagtccagtaccaaggaaaagccnagagnaaaagggtaccagtggatttttggaccttggc

SEQ ID NO: 39 - DNA, 1958 bp, Homo sapiens
  misc feature (1835): n equals a,t,g, or c
  misc feature (1885): n equals a,t,g, or c
tcgagtttttttttttttttttctcgtgagcttaggccgctggttttggtgatttttgtctgattgcaatgtctggacgtggtaagcaaggaggcaaagctcgcgccaaagcgaaatcccgctcttctcgcgctggtctccagttcccggtgggccgagtgcaccgcctgctccgtaaaggcaactacgcagagcgggttggggcaggcgcgccggtgtacctggcggcggtgttagagtacctgaccgccgagatcctggagctggccggcaacgcggctcgcgacaacaagaagactcgcatcatcccgcgccacttgcagctggccatccgcaacgacgaggagctcaacaaactgctaggccgggtgaccattgctcagggcggcgtccttcctaacatccaggccgtgcttctgcctaagaagaccgagagtcaccacaaggccaagggcaagtgatttgacaggtatctgagctcccggaaacgctatcaaacccaaaggctcttttcagagcccccctaccgtttcaaaggaagagctaacctcactgcttgtaggtagaaggaaaaaaggcactaaggttgcaaaagcttctcatttcagagagatgccaggatcctaagtgcctgccaaacttaccaattctaaggaataagtggatggatggcattactgattcctacattactgattgattctgcatccgcaaattgttttattaaaaacattctacatcatgtgtggggagataaggaggataaaatgaagagaaagaatattattgaggggaagttcttctgaatacaaaatgtgtttaattttttaaataagtattacattcacagggttcaaactatttgaagtaaagagattatatataaagaatccatccctcaacttacccaggtggtcacttttctttttcttgtgtatctgcccagtattcattcctgctgatatcagtcaataatgaatgatacgtgttttcttcacttttttcattcttgtcaggtagcagactgtgtagacttttctgcacttgcccttttcataacaatctatcttggagaactttccctatgagaacatacagagcttcctgtacacagttgcatgtactgcattatgcaaatgcattatattttatgtaacctgtccactgttggtaggcacttgagttgttttagtcttttgctatcaaacagttctgggatgattaaccctgatttactgcaaaattgaaattgctctgctattctgctggaatggtggtaagtgaactgaaaattccagtcactcttgggctagactcaacgttcttaaaaactatgtggccatcaccaaattagttattttgaaccttaatttcttcacctctaaaatggaggtaatacttaccttaagtggctatgagaatgaagatcatgtgtatgaattgttggtgctctaaagaacagcacaaataaaattattttcaaatttaattttaattgaactatgtgtaatttcttaattttgaaataattttatttgtaatgtgcataatcttatttaatgtataatgtatacattgtaatagaaacagatttcccaaattccagcctggcatgaggtaataaaaggtaatgcaaagggaraggaaagcatgtgtcattaattttctgcctaggacacctccctggttaaattgccatttcctttcttccttgcataatgattaggaaacacatcctcctgacctgcctgccctcttttgcctactttttcatctgcagtcaaggtctggttttaagactgactgttacttttacaaatctgtgtgtattggtnggctaagggcctgtatgggtccactgctgtattcccagggtcccagcatnggkgcctggacgctgcckgggcaaatagtagtcacccgaggaaatgggctggatggaatttcatggagggcct

SEQ ID NO: 40 - DNA, 477 bp, Homo sapiens
  misc feature (6): n equals a,t,g, or c
  misc feature (17): n equals a,t,g, or c
  misc feature (66): n equals a,t,g, or c
  misc feature (246): n equals a,t,g, or c
gcccangtctccgcttnccccgtcttgtacacccctaactcctgaggctcctccgaatcacgcganggaaagcggagaagctcaagtggccgccatgtcagaggcttatttccgagtggagtcgggtgcgctggggcctgaggagaactttctttctttggacgacatcctgatgtcccacgagaagctgccggtgcgcacggagaccgccatgcctcgccttgggctttcttcctggagcggagnaaggcgccgagactgacaacgcggtcccacagacttttatcggacgttttcgccgcatcatggactcctcacagaatgcttacaacgaagacacttcagccctgggtagccaggctagacgagatggagaggggcttatttcaaacagggcagaaaggactgaatgactttcagtgttgggagaaggggcaggcttctcagatcacagcttccaacctcgttcagaattaa

SEQ ID NO: 41 - DNA, 860 bp, Homo sapiens
ggcgacgagctcgtgccgaatcggcactagtggaggatgggcttctcgagggttctctgcttcactaactcccgagagaactcccacaggctcttcctgctggtgcaagcttttgggggtgtggacgtggctgagttctcctcgcgctacgggcctggccagaggaggatgatcctgaagcagtttgaacaggggaagatccagctgctcatcagcacggacgccaccgcgcgaggcwtcgacgtgcagggtgtggagctggtggtgaactacgacgccccccagtacctgagaacctacgtgcaccgggttgggaggacagctcgcgctgggaaaactggacaggccttcacactgctcctgaaagtgcaggagaggagattcctccgaatgctaactgaagctggggcacctgagttgcagcggcacgagctctccagcaagctgctgcagccgctggttcctcggtacgaggaggccctgtcccagctggaggagtctgtcaaggaagagcrcaagcagagggcggcctargctggggctcaaagggccggagggactkaacgctcaccaccctgaccctycttycagagcagtgctgatcactggatcctgtatgtgaggaaaggaatcccccagtggacacagccttcctccccaagcacgtggtctctgcgccaggcagcccgggcgtcagagctcaagcacctgccccgactggagacttcagggcttgtcactttcagagtgtggaggtcaggatggctgcgggcaatgaagccttagtaaaacggtgaaaagtactcccagacggacgcgggcacccgtcatgcttttgctgagagttgggggcattaacc

SEQ ID NO: 42 - DNA, 1131 bp, Homo sapiens
aaactagtggatcccccgggctgcaggaattcggcacgagcagcatcagccttagaacaagaaccttaccttcaaggagcaagtgaagaactctgtgaaggatggaactttcagatatcaactatttagagtccagagggagccatggcactagaaatagttgataatgaaatgagattttatgaagtataccgctccacctatgagcgtctgtctctgtgggcttgggatgttaacaggagccaaaaggagggaaagtgtgaagaataaagtagatctgagaaattctgagccaatcaggcttcttaattcaagagacaaaccaagacgttctgtcaactgtgctgtgctcttctttaagccaatgaaccccaattcctggcagtctacaagaagtctcttaatgctaatgaagaatttaaaggtctttttaaggaaatgaagggctttccaaatagaatgatttactctgaagaaacaaacaatggtatctctgaaactcacaacctaaagcccaatcttgaaaatatgttgtgcaccaagacgactgcttcagcttcttctcttatccttactttctttaatagatatttattaaactgtccagtgaaaaggtgccacaatgcccagtattgtaaacaacaggtttgcattcatgaagctttcattcattctggagtctactaatttacctgaatggtgtttgcattctgtgaaatgcctctccacgttgcatatgtcacacttttgtctgcacataactcttttttcacaagaagggtcactgccacaacagcacagtcagcgggtgaattacaggtgcctgctgcctgcctacctgggtaatctgatcttgtctgtatcgccgtgtgctcatcactgaagaattgcaggccactcatgtcagtgaccagatttgtggcttataaacattagcagtttatttatgttttaagatgcaaagatgtgtgtttgatattcactttaataattagaaatggatcttgtaaacagggcatatatcaaagatgaccttataatatgtacccgaatatacagttcaagaattttgtctgactggaaataaatgcattttgtagcaaaaaaaaaaaaaaamaaaaaaaaaaaaaa

SEQ ID NO: 43 - DNA, 1334 bp, Homo sapiens
  misc feature (1019): n equals a,t,g, or c
  misc feature (1204): n equals a,t,g, or c
acgaggsaactagttctctctctctctctccatgaccccgcagcttctcctggcccttgtcctctgggccagctgcccgccctgcagtggaaggaaagggcccccagcagctctgacactgccccgggtgcaatgccgagcctctcggtacccgatcgccgtggattgctcctggaccctgccgcctgctccaaactccaccagccccgtgtccttcattgccacgtacaggctcggcatggctgcccggggccacagctggccctgcctgcagcagacgccaacgtccaccagctgcaccatcacggatgtccagctgttctccatggctccctacgtgctcaatgtcaccgccgtccacccctggggctccagcagcagcttcgtgcctttcataacagagcacatcatcaagcccgaccctccagaaggcgtgcgcctaagccccctcgctgagcgccastagcaggtgcagtgggagcctcccgggtcctggcccttcccagagatcttctcactgaagtactggatccgttacaagcgtcagggagctgcgcgcttccaccgggtggggcccattgaagccacgtccttcatcctcagggctgtgcggccccgagccaggtactacgtccaagtggcggctcaggacctcacagactacggggaactgagtgactggagtctccccgccactgccacaatgagcctgggcaagtagcaagggcttcccgctgcctccagacagcacctgggtcctcgccaccctaagccccgggacacctgttggagggcggatgggatctgcctagcctgggctggagtccttgctttgctgctgctgagctgccgggcaacctcagatgaccgacttttccctttgagcctcagtttctctagctgagaaatggagatgtactactctctcctttacctttacctttaccacagtgcagggctgactgaactgtcactgtgagatattttttattgtttaattaggaaaagaattgttgttngggctgggcgcaktggwtcgmamctgtaatcccagtcaytgggaagccgacgtgggagggtagcttraggccaggagctygaaaccagtccgggccacacagcaagaccccatytctaaaaaattaatataaatataaaataaaaaaacgcccatagtcatacaaagcccccgcaccaataggancctcccgaatcaaccctgacccctctccttcataacctaacctgactagaaaagctattacctaaaacaatttcacagcaccaaatctccacctccatcatcacctcaacccaaaaaggcataattaaac

SEQ ID NO: 44 - DNA, 2351 bp, Homo sapiens
  misc feature (1106): n equals a,t,g, or c
  misc feature (2324): n equals a,t,g, or c
  misc feature (2331): n equals a,t,g, or c
  misc feature (2350): n equals a,t,g, or c
gaacatttggggcagggggtaaattttgccagtttgagcatcatgaggtgtaacaagaaatgggttgaatgggccaaatgcaaggagtgcatctctgggctgcaaactgacttgagtgctgcactattgctattccgtgcaaacaaaactcagcttttcctgactcagttccttgacttagtggcctttacaaaaaaagttgagtagtgtgtggcctgctgtcgcacagcccctagttagcttcatggtttctcagcttcagacccctccagcccacagaggagcccatggagggacccacttcccttggtccagacagctgggagtgggttaggcccactgctgttttgagcagggccacttgctccatttcactgaaggctttgctgggtgaaaacacttcagcatctcctcctcaggtcaacccataaagaccaggtccagcaccgtggtcttggcacatccctggcctcaggccctcacctaacagtgaggcagcagctgcccagccccgcaatgtgcctgctgtcaggcagctcttgcctgaaacttacttccacattctttcctgatgggcaggtggctgaaggcccagccatcagtgtcgcttgttgccaccccgtgcctcccttggcctctctgagctttgcccagaagaccaacaatcatacataccctaactgggacaccactctgcagaatgcagatgatccattctggaggaagctgtcccttgagctcagtgagctcccaggcaagcagggcatctggccgacttccctcacaacagctgctcccacatcccctcggactggagcttcagccctgactgaggtgggcagacctaagacctgagaccacaagattagctcagtgtctaccaagcatctagccactgtccagggccagagcataccacgtctgcagtgcctgtgagcagagccagcagttgccctgtgactgtaaccaccaaattgtccaaacacccgctgcagttagcaagaagggtaggcttcaccctcctttactgaggagaatgatgcggaggagtttcctctccagggctaggcaaggcaggcgagcagccagaagccgggtgcccacanggcagggacaggaaggctgtgctgctactggctgctcacttctccatcaacctcaccctctgcaccactaaccaagaccttgtcctcttgcctgtctcgctgctttcacagctgcaacgattgtgtctgcctcatggggttttcctccagagcctttattctgtagccagacgacacgaggagtctgtgtcactgagccagtgcttctagatgctaccctgtgtgggcggcacctcagggacagtaaatcagaaatgctggtcttgaaaccttgaaaagatcaagctgaatgttccttttcatctgtcgctgttgatcttcatctatttaaataggtattctaacgtttcctctctgtatttcatgaagctgatttcctctctctttccttttcagcaatactggagtaaccgcttcctaaaccattttgcagaaatgtaagggtgttcggttgcgtgcatgtgcgtttttagcaacacatctaccaaccctgtgcatgactgatgttggggaaaaagaaaagtaaaaaacttcccaactcactttgtgttatgtggaggaaatgtgtattaccaatggggttgttagcttttaaatcaaaatactgattacagatgtacaatttagcttaatcagaaagcctctccagagaagtttggtttctttgctgcaagaggaatgaggctctgtaaccttatctaagaacttggaagccgtcagccaagtcgccacatttctctgcaaaatgtcatagcttatataaatgtacagtattcaattgtaatgcatgccttcggttgtaagtagccagatccctctccagtgacattggaacatgctactttttaattggccctgtacagtttgcttatttataaattcattaaaaacactacaggtgttgaatggttaaaatgtaggcctccagttcattttcagttattttctgagtgtgcagacagctatttcgcactgtattaaatgtaacttatttaatgaaatcagaagcagtagacagatgttggtgcaatacaaatattgtgatgcatttatcttaataaaatgctaaatgtcaatttatcactgcgcatgtttgactttagactgtaaatagagatcagtttgtttctttctgtgctggtaacaatgagcgtcgcacagacatggtttcaggtaaataaatctattctatgataaaaaaaaaaaaaaaaaaagggnggccccnctaaggggtccaagcttang

SEQ ID NO: 45 - DNA, 1587 bp, Homo sapiens
ttttgcaaaatgtgcttatgtgacactatagaaggtacgcctgcaggtaccggtccggaattcccgggtcgacccacgcgtccgcccacgcgtccggccccatcacacctggccgatttttatttttttgtagagatggggttgtccaggctggtctcaaactcctgagctcaagcaatgtgcccgccttggcttcccaaagtgctgggattataggcgtaaaccactgcacgcagcctaccctctgcctttttaagatgatgtatttatttaatttttgccatcattggtgcttcaccttcctgcgaaggaaattccagagcctgtatttaagctacctaggcttttacactccctttattgcctttccaaatagtatctcatttggtgtactctagtgtcctatacctcttggaaacgaaagagggcccaacctacaactaagaagggacaaaccttgaactaagtaagaccttacacacccagaaagaacactgggccctccttcttcagggacaatgcagtagccacttggcttgtggaatttactgaaggctatttcctgtaacttgctagttaacttagttttgtatttcaggcagaggtgcgctctgtaatgttgggcctttgacttcacagtactggagagctgttcacacagatgtttagacctttctctctctctctctctcttttcttctttctcaacaactctttcacagaggcagtcattttgaaaggttgaaatatttggcctttaccaaagagctttttttttccttaagcaaaatcctttcagaaagaaacaaatggggaagggcagattaagaatgcatatgtcccaatccacttctataggagtttaatcatattcacatgagtaaaatgatggaagaactctttaaggtaatcctttgggataaaggatcctgggaagttctctcaggtaaagaaagcttacagcagatttgtaatatatgtctggagagctatttataagaaatttaagaggattgttttgttttcctttattaaagatttaagcctttttactttgcaaaaagaaaactacaaaagttttatagatataactttgctaattttttaaacttttctgaaacgattagctgtagccaaattatgtggttacgttttgctacattagaatttgaaaatgcaatatgtgtggtaaatctactgtttgaaatttataatggtctctgatatgattcgaattttggtaacttttgaaagttattttccccctttagtcatggatttctatttgttttttaatgttaatttttctagaaagcatctgaattgactaggcttttcctatataaaaaactcaaaacttgttaactctgtactttaataaaatttaaaattaaaactgtgttgtttttttctcttctgctagatacatatataattaaagtactcaagttagttgttttgcagagatgttgccttcagatgttaatcaggtctctcaagtttcatggagtctatgctgatcctttaattgacaaataaaagatatatatctgtggtgtgcaaaaaaacaaaaaaaaaaaaaaaaaa

SEQ ID NO: 46 - DNA, 379 bp, Homo sapiens
  misc feature (345): n equals a,t,g, or c
  misc feature (351): n equals a,t,g, or c
aattcggcacgagaatcactggggtggcttccccatgctgttctcttgatagtgagttctcatgagatctgatggctttgtaagtgtttggtagtttttcctgtattcattctccctcctgccaccttgtgaagaaggtgccttggttcccctttaccttcaaccatgactgtaaatttcctgaggcccccccagccatgggggactgtgagtcaattaaacctctttcctttataaattacccagtctcgggcagttttcttatagcagtatgagaatggacttaataaaggtaggtttaaaaagtatggctkgggcattgtagctcaacacctgtaggtcaanagctanctttgggtgggctgaggcaggagggacg

SEQ ID NO: 47 - DNA, 1920 bp, Homo sapiens
catcatcgtatcaattgtgttcatctatatcattgtttcacctctctgtggtggatttacatggccaagctgtgtgaagaaataggaaagaagaagttaccattaaccaaggatatgagagaacaaggagttaaaagcaatccatgtgactcaagcctttcacatactgacagatggtatctgccagtctcttcaaccctcttctcactttttaaaatcttgttccatgcctccaggtttatctttgtcttatctaccagtttattcctgtgaacttcagattgaaccattcattgcagcagtagccttaaaaaggcttttgtttatttctttggtttgttaactagtgtcatctatttagagaaacatttttgtttttaattgctcaaagctgtcgccgctagtcttatgagctatctactaaaactatggagaaactttgtatgtgcacacaaaagtattcaagagacagtattgctaacatctcatcttaatgtcttttgttattgagaagttttaggtgcttcaaaacaatataaatggataatagttgttatttggggaattgtaatgatgttggtgctgcttccttctaagagctcagacaagtaaagtatgaaacattcttatttcagttagatggggaacattttgctagcccattagaagcacacagaattatccttgtcctcctaatattgactttcaggaataaagttcagtgtgctgatcattcacaatacagtggatagcttgatatcttctgttttcccattgcagttgatttgagaagatgaaggtttaaatattgttgaaagttgcagttttttaaatgtgttcctttttcttctgtgaatatttagggcaatcgtgtcgctaatagaatatgtagtagagggggtggggaggtaaattcctctgacttgccaaagaaaaagaagggaaccacagtggatatgctagcattttagctgtgcaaagggaggtagtgtgggaaaagtgtttccattctgggaaaagcccaaaccgaatacggtcagcagtcaactccagggtttgggcttgattcctgttgaataatagttttgagcattctttgtggttaaataaattcttaaatctgcctagttttgatgaattcttttgtgaaacttgaaagagaatagacagtatgacatatagaattaatacaaaacagtttaacaaccatttaactgcagtgtaagaaaattggactgtaatcatatcgctactggcatctgttatctagtatgcatttctggtgtgtatctgaaaggaagacattttctaccctagatccaattgcatttatttatcaataagtgccattaaattgaaattatattacattttacactttctcaatgaatgaacaaattagtctgtagaatctagccacctgtttagcctagtcatgtgccttgaacatatatgtgtcccataatctggctcatggtacctgttcttctatccaaacctttcaattcatgctacctgattcatttatttgacatagatcttaggcccacttgaactcttttcttgtttatctagcatagcacaaacgtttttccagtcttctttatcaacactaatgcctcttaattgcatcagtatttcctattggaaaatacatctgttccagaaaaacatttggcattcctgaataatttccaaatgtttttaatccaaagaaaaaggtttaaagcttatttccctttcttatacacacctgaataaaattgatgtgcatgttttagggatcaattacctaactgttccttggtctatttatgtataagaatgctttttaaagcacatgtctcattttaaatgacgcacaaactgaagatgttaataaaatttaagagtaatacaaaaaaaaaaaaaaaaaaaaaa

SEQ ID NO: 48 - DNA, 319 bp, Homo sapiens
  misc feature (306): n equals a,t,g, or c
  misc feature (317): n equals a,t,g, or c
ggcacgagccagaacaaaaagtacaatagctgttgctcaattgctagtcaaataacttagcactggggaattccmgatgttacttagggaattttatactggtgcatctcaataaagaactgaaagtaagcacaagaagaaaaaaagccttatctttgctctagattttgcaaaggggaaatttcaacagaacgcaatcattgctacacgtctgccaagacacaaggcttgggcgatctttttttgttcatttgttttggatacttagctagtttttcctaaatgtataccattggagggggatanctgggcctttngg

SEQ ID NO: 49 - DNA, 278 bp, Homo sapiens
gacggatgaagagatcgcggcggtggagccgttacaaagcgttgaacgccggacgtaccagtaagcgtattcataaaggcctggtggtgcgtaaaggctggctgggtaaactgccttcattaccgcttcgctggcgggcgcgtggagtgatgaccctratgtttatcttgctggcggccatgctttggtttgttgctgccccggtggtgacgtatatcctctgtgcgttagtggtattgttggcagcgcctgttttgaatggcagattgtacgcccgt

SEQ ID NO: 50 - DNA, 652 bp, Homo sapiens
ctttctcaccactctcctgctagccatctctttggcactaaggccctggtcaaattggatttctttcatttttccacacttcaaagacccatgttctaggtattctccatagggatagtctctttggcatttatttggtttttctacgttttcagtcccatttactccaagactcactccctgccacctagtgcatcagatacagctacttctggctgacttttcaagggggaccaccctacctgtcatctcttcactgttcagaaatgactgtgtcagtggcacctcaaactcccttgctgtccttttccaaggagacagctaaggtggatggagatgcagaatggacctcacgttcgccctagtcaggactgataccctttccgtttcagaggattgccaagaaaaaactcacagttgaggcagggtgctctgaggtcggctgcggtgtgggaggcacgsctgggcmtgctctctgggctggagcaggtggattcgaaggcctgtctagcacgagggcccaaaggtcttgtcagtggccagtagctctgccgcctttcccagagagggggtccaggggacatcctggaaggctgggccctgggccaccttctgctcttgcaagctagagccagcccaatagggggcggat

SEQ ID NO: 51 - DNA, 943 bp, Homo sapiens
  misc feature (140): n equals a,t,g, or c
  misc feature (786): n equals a,t,g, or c
  misc feature (843): n equals a,t,g, or c
gctttgcaacagatcgcttcttcaaatgctggcacaacgcccagagctcgatgagagaacagcccatcttcaccacccgagcgcatgtcttccagattgaccccaacaccaagaagaactggatgcctgcgagcaagcangcggtcaccgtttcctacttctatgatgtcacaaggaacagctatcggatcatcagtgtggacggagccaaggtgatcataaacagcacaatcacaccgaatatgaccttcaccaaaacgtcacagaagtttgggcagtgggccgacagcagagccaacacagtgtttggtttggggttttcctctgagcagcagctgacaaagtttgcagagaaattccaggaggtgaaagaagctgccaagatagccaaagacaagacgcaggagaaaatcgagacctcaagtaatcattcccaagcatccagtgtcaacgrgacggacgatgaaaaggcctctcacgccggtccagccaacacacacctgaagtctgagaatgacaagctgaagattgccttgacgcagagcgcaccaacgtgaagaagtgggagatcgagctgcagacccttcgggagagcaatgcacggctgaccacagcactgcaggagtcggcagccagtgtggagcagtggaagaggcagttctccatctgccgtgatgagaatgaccggctccgcaacaagattgatgagctgggaagaacaatgcagtgagatcaacagagagaaggagaagaacacgcagctgraagaggaggatcgaggagctnggaggcagagctccgagaaaaggagacagagctggaaagatcttccggaaaacaaantggaatcmtacytscagctcctgttcagattgcggattttgtctcttgagaagctagaggcgggcagagagagacattcaaaacttggaagacaaatgcg

SEQ ID NO: 52 - DNA, 832 bp, Homo sapiens
gcgtcgacatagaattgaagttgctcgtcagctgattgaagataaggagattggcctggattatccaggtaggctcaatgtaatcaggaagggcctttaaagtgagagagggasgsagaagaggaagtcagagcgatgtgctgtgaaatctactaccgtttgctggttttgaaaatggagaaaaagagtgaggaactgagaaacatggatggccttgggaacgtggaaaagggtcactgaaatgggacgacatgaactcaaggaggctatttatgaccatgtcatttgcaacatgaagaaagcttatctggagtgaaagtaaatgagaccaacagagatragagacccggagaaatcctggttacactgcttgaatcctgtcagtcctatactggagtcctgttaatacaaaataatagtaataatccctctgtttcttatgtttatgccaacttcaacaaaaagaaacttgactaagagacaatataagaayttaatgtgtaattaagaaagaactctccaccacggggaatgtgaaaggtatatgagtcccttttcacgatgcgatgtcatgtcttttaaataagccatactttatgttcaataaaaagagaataagcaggattcgcmagagaacacaatccctttttaactgctgggaagatacytttagtcattaatgrctggacgacaatttgggrcacmtatatggatattggccggtttgtgatgatgtgattgggcctctaagtgacaacattgttccctgtatagagtgagtggcaagtgcatttataaaattggccatcatggctgttaaatttaaaaaaaa

SEQ ID NO: 53 - DNA, 1554 bp, Homo sapiens
agcgggcctggagttcagtgggtgcagcctgcttgcragctgaggccagacaggggggcgcctacggacggawaaggaggagcattgcaggccgagacgccctcatcagcagagtcacaggagttttgggaagtgaagagaaaagaaaagttgattacaaacgggaccatattttgcttcgaaatggaaccagcagttagcgagccaatgagagaccaagtcgcacggactcatttgacagaggacactcccaaagtgaatgctgacatagaaaaggttaaccmgaatcaggccmagagatgcacagtgatcggtggctctggattcctggggcagcacatggtggagcagttgctggcaagaggatatgctgtcaatgtatttgatatccagcaagggtttgataatccccaggtgcggttctttctgggtgacctctgcagccgacaggatctgtacccagctctgaaaggtgtaaacacagttttccactgtgcgtcacccccaccatccagtaacaacaaggagctcttttatagagtgaattacattggcaccaagaatgtcattgaaacttgcaaagaggctggggttcagaaactcattttaaccagcagtgccagtgtcatctttgagggcgtcgatatcaagaatggaactgaagaccttccctatgccatgaaacccattgactactacacagagactaagatcttacaggagagggcagttctgggcgccaacgatcctgagaagaatttcttaaccacagccatccgccctcatggcattttcggcccaagggacccgcagttggtacccatcctcatcgaggcagccaggaacggcaagatgaagttcgtgattggaaatgggaagaacttggtggacttcacctttgtggagaacgtggtccatggacacatcctggcggcagagcagctctcccgagactcgacactgggtgggaaggcatttcacatcaccaatgatgagcccatccctttctggacattcctgtctcgcatcctgacaggcctcaattatgaggcccccaagtaccacatcccctactgggtggcctactacctggccctcctgctatccctgctggtgatggtgatcagtcctgtcatccagctgcagcccaccttcacacccatgcgggtcgcactggctggcacattccactactacagctgcgagagagccaaaaaggccatgggctaccagccactagtgaccatggatgatgctatggagaggaccgtgcagagctttcgccacctgcggagggtcaagtgagggacactggaggctgggctctctcgacacgttgctcagccagtcactccttcccctgtggattgatgaaataacatcctttgaatgagtttgctctgagcctgtgactccttctgctaggcagagagcgcaccctactctttccgtgacgatgagggcggcaaaaacagacatttcttccttcatggaactggatttggatttcttgaagcaggcagcttcatattataccgatttgttctctgtcaa

SEQ ID NO: 54 - DNA, 281 bp, Homo sapiens
agctatttacaggttttaagcaaatgattatgtctgtgttttaaaggtattatattctagatgcttcatggaattacgtcatttatactttataaatctataatgtgtamtgaattaaaaacaagcttgggaaacataaactcaagttagaaaatatgggtttgacataaaaccttaaatatgtttcatttgtttgcttgtttggcttgtttgtttctaacacaagtttaacctacatgtgagtcacctttgggattgatgagtctagrgtttgaaaccag

SEQ ID NO: 55 - DNA, 807 bp, Homo sapiens
  misc feature (770): n equals a,t,g, or c
gcgtcgaccggagagctgtgtcaccatgtgggtcggttgtcttcctcaccctgtccgtgacgtggattggtgagaggggccatggttggggggatgcaggagagggagccagccctgactgtcaagctgaggctctttyccccccaacccagcaccccagcccagacagggagctgggctcttttctgtctctcccagccccactccaagcccatrcccccagcccctccatattgcaacagtcctcactcccacaccaggtccccgctccctcccacttacsccagarctttctccccattgcccagccaactccctgctcccagctgctttactaaaggggaagttcctgggcatctccgtgtttctctttgtggggctcaaaacctccaaggacctctctcaatgccattggttccttggaccgtatcactggtccacctcctgagcccctcaatcctatcacagtctactgacttttcccattcagctgtgagtgtccaaccctatcccagagaccttgatgcttggcctcccaatcttgccctaggatacccagatgccaaccagacacctccttcttcctagccaggctatctggcctgagacaacaaatgggtccctcagtctggcaatgggactctgagaactcctcattccytgactcttagccccagactcttcattcagtggcccacattttccttaggaaaaacatgagcatccccagccacaactgccagctctctgattccccaaatctgcatccntcttcaaaacctaaaaaaaaaagaaaaaaaaagtcga

SEQ ID NO: 56 - DNA, 656 bp, Homo sapiens
  misc feature (545): n equals a,t,g, or c
gaccctctcacaccaggttacccagcaaatgaatatgcttataggcgtggaattgcagaggctgttggtctgccaagtattcctgttcatccaattggatactatgcatgcacagaagctcctagwaaaaatgggtggctcagcaccaccagatagcagctggagaggaagtctcaaagtgccctacaatgttggacctggctttactggaaacttttctacacaaaaagtcaagatgcacatccactctaccaatgaagtgacaagaatttacaatgtgataggtactctcagaggagcagtggaaccagacagatatgtcattctgggaggtcaccgggactcatgggtgtytggtggtattgaccctcagagtggagcagctgttgttcatgaaattgtgaggagctttggaacactgaaaaaggaagggtggagacctagaagaacaattttgtttgcaagctgggatgcagaagaatttggtcttcttggttctactgagtgggcagaggrgrattcaagactccttcaagagcgtggcntgggctttatattaaatgctgactcatctataggaaggaaactacactctgaggagttggattgtacaccgcttgatgtacagcttggtacacaaccttaccaaagagctg

SEQ ID NO: 57 - DNA, 794 bp, Homo sapiens
gcggccgcaggcagcccaccccgyccacgtcgccggagccgccgcgcagcagccccaggcagacccccgcgcccggccccgcccgggagaagagcgccggcaagaggggcccggaccgcggcagccccgagtaccggcagcggcgcgagcgcaacaacatcgccgtgcgcaagagccgcgacaaggccaagcggcgcaaccaggagatgcagcagaagttggtggagctgtcggctgagaacgagaagctgcaccagcgcgtggagcagctcacgcgggacctggccggcctccggcagttcttcaagcagctgcccagcccgcccttcctgccggccgccgggacagcagactgccggtaacgcgcggccggggcgggagagactcagcaacgacccatacctcagacccgacggcccggagcggagcgcgccctgccctggcgcagccagagccgccgggtgcccgctgcagtttcttgggacataggagcgcaaagaagctacagcctggacttaccaccactaaactgcgagagaagctaaacgtgtttattttcccttaaattatttttgtaatggtagctttttctacatcttactcctgttgatgcagctaaggtacatttgtaaaaagaaaaaaaaccagacttttcagacaaaccctttgtattgtagataagaggaaaagactgagcatgctcacttttttatattaatttttacagtatttgtaagaataaagcagcatttgaaatcgcaaaaaaaaaaaaaaaaaaaaaaaaaaaaaaaaaa

SEQ ID NO: 58 - DNA, 1155 bp, Homo sapiens
  misc feature (135): n equals a,t,g, or c
  misc feature (432): n equals a,t,g, or c
  misc feature (443): n equals a,t,g, or c
aaaaagccagaagatgaaattgctagttcaaagttgttggattgctagtcatgtcatgaggatcagaaggttgagatttttgtagaagcttagaccagtgtgatagtagtgattggatcaagacgtttgcaaaanggactaggctcatagtaacttcgcctgataaacaacttgatgcagatgtttcccccaagcccactattttcttccttcrattgctgaaacaaarctccagaaggctggaacatacctttgtcttcttgagaaatttttcccwgatrttattaagatacattggsaagaaaagaagagcaacacgattctgggatcccaggagggggaacaccatggaagactaacgacacatacatgaaatttagctggttaacggtgccagaaaagtcactggacaaagaacacagatgtatcgtncagacatgagnaataataaaaacggrgttgatcaagaaattatctttcctccaataaagacagatgtcatcacaatggatcccaaagacaattgttcaaaagatgcaaatgatacactactgctgcagctcacaaacacctctgcatattacatgtacctcctcctgctcctcaagagtgtggtctattttgccatcatcacctgctgtctgcttagaagaacggctttctgctgcaatggagagaaatcataacagacggtggcacaaggaggccatcttttcctcatcggttattgtccctagaagcgtcttctgaggatctagttgggctttctttctgggtttgggccatttcagttctcatgtgtgtactattctatcattattgtataacggttttcaaaccagtgggcacacagagaacctcactctgtaataacaatgaggaatagccacggcgatctccagcaccaatctctccatgttttccacagctcctccagccaacccaaatagcgcctgctatagtgtagacatcctgcggcttctagccttgtccctctcttagtgttctttaatcagataactgcctggaagcctttcattttacacgccctgaagcagtcttctttgctagttgaattatgtggtgtgtttttccgtaataagcaaaataaatttaaaaaaatgaaaarwaaamaaaaaaaaaaaaaaaaaaaaa

SEQ ID NO: 59 - DNA, 492 bp, Homo sapiens
  misc feature (201): n equals a,t,g, or c
  misc feature (454): n equals a,t,g, or c
  misc feature (467): n equals a,t,g, or c
  misc feature (473): n equals a,t,g, or c
ggcacgagtgcaggggtcaacccttataaatgcagtcaatgtgagaaatccttcagtgggaaattacgccttcttgtacaccagagaatgcacacaagagagaaaccatatgaatgcagtgagtgtggaaaagccttcattaggaattctcaactcattgtacatcaaagaactcattcaggagagaaaccctatgggtgncaatgaatgtgggaaaaccttctctcaaaaatcaattctcagtrcacatcagagaacacatacaggagagaagccttgtaagtgcactgaatgtgggaaagccttttgttggaagtcacagctcattatgcatcagagaactcatgtagrtgacaaacattgataattttacgaaactctgaaaagtggattcacaagagatagaaacaatcatatataaagagaaactctgtaatgggaatcatcttgtccntcttccagaaaantcatantgaatagaaactttatgga

SEQ ID NO: 60 - DNA, 1617 bp, Homo sapiens
  misc feature (1590): n equals a,t,g, or c
  misc feature (1592): n equals a,t,g, or c
  misc feature (1595): n equals a,t,g, or c
  misc feature (1617): n equals a,t,g, or c
ggaggccctgcgagaggactgtgcggcccaggcacagcgggcacagcgggcccaacagwtgctgcagctgcaggtgttccagctgcacaggagaagcggcaattgcaggacgacttcgcacagctgctgcaggagcgcgaacagctggagcggcgctgcgccaccttggagcgggacagcgggagctcgggccgaggcttgaggagaccaagtgggaggtgtgccagaaatcaggcgagatctccctgctgaagcagcagctgaaagagtctcaggcagagctggtgcagaagggcagcgagctggtggctctgcgggtggcgctgcgggaggcccgtgctacgctgcgggtcagtgagggccgtgcgcggggtctacaggaggccgcccgagctcgggagctggagctggaagcctgttcccaggagctgcagcgacaccgccaggaagctgagcagctgcgggagaaagctgggcagttggatgctgaggcggccggactccgggagccccctgtgccacctgccaccgctgacccattcctcctggcagagagtgatgaggccaaagtgcagcgggcagcagccggggttgggggcagcttgcgggcccaggtggagcgattgcgggtggagctgcagcgggagcggcggcggggtgaggagcagcgggacagctttgagggggagcggctggcctggcaggcagagaaggagcaggtgatccgctaccagaagcagctgcagcacaactacatccagatgtaccggcgcaaccggcagctagagcaggagctgcagcagctcagcctggagctggaggcccgggagctcgctgacctgggcctggccgagcagccccctgcatctgcctggaggagatcactgctactgagatctagggccctcagcaaccagctctgtagggagctctgccagaggggcagcagctgcagatccacttaggccccagggtccacggatggccccaaaggctgagggccccaaagccacttgtctcctaggatccaggcctctgggcttctgccaagaactcagggtggccctatgacttggaggagcaagatcagaccgctcaaaggtccccgtgttcactgttacccagaggctcttgttactacccacttcattccccaccgctgccagtgccactgccaaccctgttcacaggcgcttccagcccactccagccaggggagcagggaagaagaaggggctccctcctcttcacattccccccgaccccaaagccagagaaagccagatggcaccagctgctccggatgtgcctgcccacattgggggacagggccgggcctgggctcggttcccaggtttgagctctgcagcctctctcctggagtgagggggctgaagtcagaccaaaggaagaactcagaaatgtcttgtttatttgtgtttgtgaccaagcagcctctcccttcacccaggtttatggcctcgttttcacttgtatatttttcacactgtaaatttcttgtacaaacccaaagaaaaaattaaaaaaaatttttttgtttaaaaaaaaaaaaaaaaaaaaaaaaaaaancncgngggggggcccggtacccaattn

SEQ ID NO: 61 - DNA, 1653 bp, Homo sapiens
aaatatgagaattttaaagtaatatattgatyaaagatcactgatgatatagatataatatatcataacagaaggaaagtaaatggacttgagcttaacttctcaccctggaattattagtgggtgaagaggggaatcattagcattctgggcgtttttatattaaatgttttgtgaatatgccagaagatctgccttcaacttgtaattaggcaagatagtaaygcttgatggtaacttctatgtttgtgtagaaataataccagttagttttggaaagccattcagatccattcaaaaattccataaagtatgatgtatgctttggaagagggatatgagtgatacaattgttatataaatggaatagacaaaccatttgaatgcatttttctagggcaaacattttttgagatttttgagttaagaagatttttcggcttgagcagaagatgtgtttgttttgcatttttcagctccaaggaaatagcccccatggctttaaaaggccctgaagttcagatagtagtaggtagtgttttgttattgttttaatttgagagttgcaggaataatgggcagagctgtcatttgccggtackaccatctgcctacatagaattattggactgtaagctaaaacagactgtaaaagacctacttgctaaagcattgcttattcagtggtattcagtagataagatctatttcctgatatattgtgctcaagttatttgcacatcttaagaaacttttaatatctaaaaccattgttgtaagatttaggtagaggaggtttccttttgtgtgatgcataataatagaaaacactgatacagtgtttactatgtgccaagcaagcatatgataactaattcttaacaactctatgaggcagggtcatttattatcctgttgtcatatgaggaaatctcgccagagagaagttaattaacctgcccaaggtcgtatagttagtaaagtggtcatgcttggattttaacctaggcagattacttcagagtcagcgtctgccttactatcctgtttcctgagcaggaatttccccttgtgtcaggcaacactaggtgttaggagtggaggtgtgcagatgttgccttacattctgttttcctgatgtggtgtgcttcctaagagtacaaacctgagcatatgtccaggcttgcaaagtctcaggcaaagctgggactaaggcttgtgtttcctgccttgggtaggattttcttctatgcatgttgggtgcttctcacttaacctaatagtatgccttgtctgttttccccccttcccctttttgtttaaattgattcacagaacacaaaaatttactaggtatgaacatttgaaaaaatggaatagagaaaatggtacatcacatgtaataaagataaatattgttttgtgaaatgtctttttcaatcataaatatgtgttgtgtgctatataaaactatttcttattgtggatattgaagtttgaagcctgttgttcatctatagatgcactggatgggattggaagtcttcagatttcagtagggttttccacaagcttatgaagacattgttctgtttaggctgtaaactgtttttatttcttgatgaaaaatgttcttctatttatatgatccca

SEQ ID NO: 62 - DNA, 440 bp, Homo sapiens
  misc feature (408): n equals a,t,g, or c
  misc feature (410): n equals a,t,g, or c
  misc feature (431): n equals a,t,g, or c
gaattcggcagaggaataaataatttattatatggtaaaggtggcatttcaaatcaatgggaaaaggtacgtttattgacaaaggtattgaagcaacgggttaagatttggaaaataactatctctgctcccaaacattcaccatatgagactgtagacctaataaaaataaacataagattatgagaataaaatatcaataaatattttatactatcttgcagtgggataggaattgtctcactcctgctggggtgactccccatgaaccccagggctcttcagttccaaagrggaaaaaggggaacagatggcctcctccccttcctcactcccctgggacccaggattgctccctgaaggttttcgagccaccctccttcccattcctcctggggggccaaggangnttaaacagcagggcccttccngtgttgccc

SEQ ID NO: 63 - DNA, 1062 bp, Homo sapiens
  misc feature (948): n equals a,t,g, or c
  misc feature (974): n equals a,t,g, or c
aattcggcacgagggaaccttgaaccagccrctgaccaaattggatagatcttctgaagagcctttgggagttctggtaaatcccaacatgtaccagtcccctccccagtgggttgaccacacaggtgcagcctcacagaagaaggctttccgttcttcaggatttggactagagttcaactcatttcagcaccagttgcgaatccaggatcaagaatttcaggaaggctttgatggtggctggtgcctctctgtacatcagccctgggsttctctgcttgtcagagggattaaaagggtggagggcagatcctggtacaccccccacagaggacgactttggatagcagccacagctaaaaaaccctcccctcaagaagtctcagaactccaggctacatatcgtcttcttcgtgggaaagatgtggaatttcctaatgactatccgtcagttgtcttctgggctgtgtggacctaattgactgcttgtcccagaagcaatttaaggagcagtttccagacatcagtcaagaatctgattctccatttgttttcatctgcaaaaatcctcaggaaatggttgtgaagtttcctattaaaggaaatccaaaaatctggaaattggattccaagatccatcaaggagcaaagaaggggttaatgaagcagaataaagctgtctgacccaggagaaaaggaactatacagcatagtggagttttgtgtactaaaattgctatctactggtcctttggaattgaagtagtagaaacctaaaggcttggcgtcaggcttgaatatctcagaacttaaactcttaccaaaatctgtatatttttcttaaggagtgggattcctactttatgtaatggggtcgaaatctttgaacacattatttataaaaacctgtttaaaaggtcgacggtatcgataagcttggatatcganttcggcacgagcccacctctacctcnggggggaccggcctggacgctggtggccccgggacccagcagagctgggggaagggtcagccccccaaagaaatgggggtgcatgctg

SEQ ID NO: 64 - DNA, 422 bp, Homo sapiens
  misc feature (252): n equals a,t,g, or c
  misc feature (349): n equals a,t,g, or c
ggcagagggaagaggaagggaggggaggggagccccttcttcctggtagatacaaagctgggctctggatacccttgaagcagtgcacagcctgtacaacagtccccagcagccctgtctatcccccagcatctccctgctagctgctgttccctctcctcccgctggctgggcctgctgccaagctgtggtgactcagctgagctggcacattgaccccagcttattgtttaaaaaccagcccgactgggnaatttatggtttcctatccccttccacacatttttctggccacaaggcaagaaacttatctctggcatcttcagatttcttstatttwattttgggncttcccttgcctggcaatatgtttcatagagtgggtaagtgagacctgacaggtgttttcaaggataatttca

SEQ ID NO: 65 - DNA, 709 bp, Homo sapiens
  misc feature (674): n equals a,t,g, or c
  misc feature (684): n equals a,t,g, or c
  misc feature (692): n equals a,t,g, or c
  misc feature (697): n equals a,t,g, or c
aattcggcagagcgcttctccattctctgtgggttgtgttgttttcttcatgaattccgaagtttactcttggatgatctagttgaagagctagtgtttactgatcacactgtcttctctccttgaaattggtgcatattagctgcttctagtcagccctcttgcccagaatccccaaaaagaaaattgttagttcagggattgtagctttttttttgttttaacatgagatatgtgattataataaacttcaagtattcaggaccattttatggataaaaggagaatctaacttttaaaagttgggaaaatgatttaatattggaaactcaagagttacaaattcttacagttatttcaaaactaaaggtttctttagagctccaaatttagagctataaatcctatatccgtaatcaaatccagtactgataacaatgaacaattgctgaagagtaatattctctctctctttaccaatgtaagccttagcattggtactttcttgwawtatctttttgcatgccattatgatcagaaaaaacaaaaagctacccagaaagggcagccacattctaaatgataggcttttacctccctgagggggctgctaggtacctacctggattaggaattcatttggtaaacaacagggggccttttaaatctaaatnaccatttccnaataattngtttnccgtttattccg

SEQ ID NO: 66 - DNA, 1302 bp, Homo sapiens
gctcgacaagaagagaaagaaggacatgctgaatagcaaaaccaaaactcagtatttccaccaggaaaaatggatctatgttcacaaaggaagtactamagagcgccatggatattgcaccctggggraagctttcaacagactggacttctcaactgcmattctggattccagaagatttaactacgtggtccggctgttggagctgatagcaaagtcacagctcacatccctgagtggcatcgcccaaaagaacttcatgaatattttggaaaaagtggtactgaaagtccttgaagaccagcaaaacattagactaataagggaactactccagaccctctacacatccttatgtacactggtccaaagagtcggcaagtctgtgctggtcgggaacattaacatgtgggtgtatcggatggagacgattctccactggcagcagcagctgaacaacattcagatcaccaggcctgccttcaaaggcctcaccttcactgacctgcctttgtgcctacaactgaacatcatgcagaggctgagcgacgggcgggacctggtcagcctgggccagctgcccccgacctgcacgtgctcagcgaagaccggctgctgtggaagaaactctgccagtaccacttctccgagcggcagatccgcaaacgattaattctgtcagacaaagggcagctggattggaagaagatgtatttcaaacttgtccgatgttacccaaggaaagagcagtatggagatacccttcagctctgcaaacactgtcacatcctttcctggaagggcactgaccatccgtgcactgccaataacccagagagctgctccgtttcactttcaccccaggactttatcaacttgttcaagttctgaatcccagcacatgacaacacttcagaagggtccccctgctgactggagagctgggaatatggcatttggacacttcatttgtaaatagtgtacattttaaacattggctcgaaacttcagagataagtcatggagaggacattggaggggagaaatgcagttgctgactgggaatttaagaatgtgaacttctcactagaattggtatggaaaagcaaaatactgtaaataaactttttttctaacaatttgccagcaagactataagggcaataattctatttcagcggtgaaaatggagtcctcttaatggtcacagaaactctcttatagttccctaggaagaaaaaggcaaaactcaaatacaaaataggacgctttgtttacaatgtgaaaatttgtttagaaaag

SEQ ID NO: 67 - DNA, 1046 bp, Homo sapiens
aattcggcacgagcttctgttggtgttattttcaattctatttccagtgccacaatagagtgatatttaagcaactcctacaggcgaaggccctgcagttcctccagattgacagttgcagactgggcagtgtcaatgagaacctctcagtattgctgatggccaaaaagtttgaaattcctgtttgcccccatgctggtggagttggcctctgtgaactggtgcagcacctgattatatttgactacatatcagtttctgcaagccttgaaaatagggtgtgtgagtatgttgaccacctgcatgagcatttcaagtatcccgtgatgatccagcgggcttcctacatgcctcccaaggatcccggctactcaacagaaatgaaggaggaatctgtaaagaaacaccagtatccagatggtgaagtttggaagaaactccttcctgctcaagaaaattaagtgctcagccccaacaacttttttctttctgaagtgaaagggcttaaaatttcttggaaatagttttacaaaaatggatttaaaaaatcctaccgatcaagatgagttcagctagaagtcataccaccctcaggaatcagctaagtaattattacttgattcttttagcaaatcaatgcacgttatcctacttaatccttaaataagtttagatttaactaacccaaagtccaggaggatgttcttacaaaaatagctatatcaagggctggcacctagacattaaactgtaatttgaaaataagcaacatgttgcataacttgttggaataattccttgttctgtttaacacttgtcataaattagcagaataaaaatagtcgtgcaacaccgggggtatctggtatgcaacgaagggraaaatatttcactgattaaccccgaagtggttttgcatcttttccttgcttaatctaagcatattattagagaagtcacaccatgctgaagctaatgagggcaaaatggtagtccatagattattttaaaataaccctttaaggttataaaagtttaaaaaaaaa

SEQ ID NO: 68 - DNA, 501 bp, Homo sapiens
  misc feature (45): n equals a,t,g, or c
  misc feature (311): n equals a,t,g, or c
  misc feature (404): n equals a,t,g, or c
caagagaagaaattatgaaagggcgtgaataccaagaggcaggtnattgggggccatctcagaggctgcccaacacaggctactctttggcccccgatgattcatgttccttccaaatgcaaaatgccccgtcccaagatctccaaaagtcttatcccattataggattagctcagagttcagaaccttatcatctaaagttccaggtgtaggtaaggcttttgggtgtagttattttattacagctcctagcacacttctagtgttatactaatgcctcttctgtatagttcacttggaaataaatgatntaggtactttgatccatatggagttctgtgtaggaagatcaacctagatctgatgttagctggtaaacactgtagtgttaaaaaggcactgtnttatgatagctctttttgacagtgactgggattatggggcaaatggtaaatggcatgcaattgagatcagtattaggttattaattgaactggaatc

SEQ ID NO: 69 - DNA, 581 bp, Homo sapiens
  misc feature (149): n equals a,t,g, or c
aattcggcacgagggaaagaaggccatgtaggggcttgctttagtcatccactgctaactcattaactattaattcaagcaatatgtattatagaaccgttttgtgtagcattggaatattgtccattttgtaagtcattgtgaatgtncttaattatcagcttgaaggtatttttgtattaaaagttgacattgaagaacctaagtggatgatgggatttggggccagtagtgaaagtatgtttcctctaaaatatttccctaaacagtggtatacatggttattttattatgagatttgtatatgtyctgtgtttctctgtgaacaatgtttcagtctctctgtcaccatatgtaaggggaagtccacaaatatagactacattgcacaaaactaaaattgttaattacaagaaaatataggtgcttaccttttgaaggtttattaatacatatggttgtcacaatacgtatatatgataaatggtgtacatatacagatgtttatggtgtataaatttttctatacccaaaaaaaaaaaaaaaaaaaaaaaaaaaaaaaaaaagggggggccccccca

SEQ ID NO: 70 - DNA, 1076 bp, Homo sapiens
  misc feature (911): n equals a,t,g, or c
tccaaacagagggagcagctatttaaggggagcaggagtgcagaacaaacragacggcctggggatacaactctggagtcctctgagagagccaccaaggaggagcaggggagcgacggccggggcagaagttgagaccacccagcagaggagctaggccagtccatctgcatttgtcacccaagaactcttaccatgaagaccctcctactgttggcagtgatcatgatctttggcctactgcaggcccatgggaatttggtgaatttccacagaatgatcaagttgacgacaggaaaggaagccgcactcagttatggcttctacggctgccactgtggcgtgggtggcagaggatcccccaaggatgcaacggatcgctgctgtgtcactcatgactgttgctacaaacgtctggagaaacgtggatgtggcaccaaatttctgagctacaagtttagcaactcggggagcagaatcacctgtgcaaaacaggactcctgcagaagtcaactgtgtgagtgtgataaggctgctgccacctgttttgctagaaacaagacgacctacaataaaaagtaccagtactattccaataaacactgcagagggagcacccctcgttgctgagtcccctcttccctggaaaccttccacccagtgctgaatttccctctctcataccctccctccctaccctaaccaagttccttggccatgcagaaagcatccctcacccatcctagaggccaggcaggagcccttctatacccacccagaatgagacatccagcagatttccagccttctactgctctcctccacctcaactccgtgcttaaccaaagaagctgtactccggggggtctcttctgaataaagcaattagcaaatcawrwaaaaaaaaaaanaaaaaagaaaaaaagttttggcctaaatgagtcgtattacagttgacgcggccggcgaatttagtagatggtgtaattcgacccgagaaattccggaaccggaactctgaggggtgacaagtttccccaagagcggcggattaaggcttgggcggacaaagggcg

SEQ ID NO: 71 - DNA, 376 bp, Homo sapiens
  misc feature (347): n equals a,t,g, or c
gcccacgcgtccgaggagggccgcstttccggtctgggtcccsgagaggactgccttgctcacctgtcccctcggcgcggccccggggagctcccgagaggccccmgggatcgctggccctccgaactccacagcaatgagcaagttgggcaagttctttaaagggggcggctcttctaagagccgagccgctcccagtccccaggaggccctggtccgacttcgggagactgaggagatgctgggcaagaaacaagagtacctggaaaatcgaatccagagagaaatcgccctggccaagaagcamggcacgcagartaagcgagggatcwgmacwaaatagatgntttgatgcaagagatcacagagcaacagg

SEQ ID NO: 72 - DNA, 374 bp, Homo sapiens
aattcgacsagccagggcaccctgcccatgtatcccamgcagagggagcagaaccagcggtgtaactactgtgcttgacacccagggcaggtctttttttaactcaccgatcttccatgcaacaaaattgttttctgtgaaaagcaggaaatgaataacaacagcgtaggtactccacttcaaatttcccaagaaattcagaagaattgtgaacaagttgctggtttcacaatactgcaagacactgcaagttattccaagttcctacaggacaacgatgcacaattatttacttacttatgtttaaatatacctatcagtttgactttcatcctttggtgacattctaataatttatgtaaataattattcag

SEQ ID NO: 73 - DNA, 419 bp, Homo sapiens
  misc feature (221): n equals a,t,g, or c
  misc feature (411): n equals a,t,g, or c
aattcggcagagctgcattgtcttttagggccaatggacttggaggcatagagattttataactactgccagaacccaaatattgccagtsggcctcttctgctgctgttgctagctgtcttcttctgggggaaatgggttgggttctaaatatgaattaacacagggctgtcttcgatgaattcagcacaaaatgttctcagcaattgaacactcggagngaagtgttaggcatttagtgcagactcatagaatagcaggacagggagggatttggatctgggcaagcaggagatggrtatgaacatctgtcttttgagacctgccgaggtggcaatgaaggtagaggcccctgtgttgaggtctttattcaagaggctgtggtccctttgggacttaacatagcatccnttagacag

SEQ ID NO: 74 - DNA, 286 bp, Homo sapiens
  misc feature (134): n equals a,t,g, or c
  misc feature (154): n equals a,t,g, or c
gcaggcgacttgcgagctgggagcactttaaaacgctttggattcccccggcctgggtggggagagcgagctgggtgccccctagattccccgcccccgcacctcatgagccgaccctcggctccatggagccnggcaattatgccaccttggnatggagccaaggatatcgaaggcttgctgggagcgggaggggggcggaatctggtcgcccactcccctctgaccagccacccagcggcgcctacgctgatgcctgctgtcaactatgcccccttggatctgc

SEQ ID NO: 75 - DNA, 633 bp, Homo sapiens
  misc feature (89): n equals a,t,g, or c
  misc feature (531): n equals a,t,g, or c
  misc feature (570): n equals a,t,g, or c
  misc feature (618): n equals a,t,g, or c
  misc feature (623): n equals a,t,g, or c
aggtagaaaagcgagcagccgtcctttcacagcctcagaaagtgctcgcttcccttcgggggctttcgcgaatcccgaggcaatctcgnaggcggtatttgacctgtccaaagacgacttgatacctctataatgtaacagaaaaggtcagaaaatattaagcaagtagaagtgtggagcatattaagcaagatgaacatctcgggaagcagctgtggaagccctaactctgcagatacatctagtgactttaaggacctttggacaaaactaaaagaatgtcatgatagagaagtacaaggtttacaagtaaaagtaaccaagctaaaacaggaacgaatcttagatgcacaaagactagaagaattcttcaccaaaaatcaacagctgagggaacagcagaaagtccttcatgaaaccattaaagttttagaagatcggttaagagcaggcttatgtgatcgctgtgcagtaactgaagaacatatgcggaaaaaacagcaagagtttgaaaatattccggcagcagantcttaaacttattaccgaacttatgaatggaaaggatantctaccgggaggaattaaaagctttctggacaactccgccggaattgngatgntcaccgcttc

SEQ ID NO: 76 - DNA, 256 bp, Homo sapiens
  misc feature (48): n equals a,t,g, or c
  misc feature (134): n equals a,t,g, or c
agcacaagttcaggaccagcctgcgcaacatagcaagatccccatctntacaaaaaaaataaacaattagccagggcatagtggcatatgcccattgtcccatctactctggaggctgaggcgggaggttcgangttcacagaacccccataacccatccagctagccaggtagaaggcctccaggtccgacgttgcattccccagggtctgatgctgtctgcaatcttcatccctaggcagwagagctaaaaatg

SEQ ID NO: 77 - DNA, 694 bp, Homo sapiens
  misc feature (668): n equals a,t,g, or c
  misc feature (673): n equals a,t,g, or c
agcagcaaggccaagcatgcaagaktcaccatccaccctggccatgatgcagggcctcctttgctggacccgcagccctgcaggacagagactggcagcgcaccgtcatcgccatgaatgggatcgaagtaaagctctcggtcaagttcaacagcagggagttcagcttgaagaggatgccgtcccgaaaacagacaggggtcttcggagtcaagattgctgtggtcaccaagagagagaggtccaaggtgccctacatcgtgcgccagtgcgtggaggagatcgagcgccgaggcatggaggaggtgggcatctaccgcgtgtccggtgtggccacggacatccaggcactgaaggcagycttcgacgtcaataacaaggacgtgtcggtgatgatgagcgagatggacgtgaacgccatcgcaggcacgctgaagctgtacttccgtgagctgcccgagcccctcttcactgacgagttctaccccaacttcgcagagggcatcgctctttcagacccggttgcaaaggagagctgcatgctcaacctgctgctgtcccttgccggagcaaaccttgcttcamctttccttttcctttttggraccamctgaaaaagggttggcagagaagggaggcagttcattaagttccttgcaaaaaacttngccanggtttttttggccccaaggtt

SEQ ID NO: 78 - DNA, 2562 bp, Homo sapiens
  misc feature (75): n equals a,t,g, or c
  misc feature (2556): n equals a,t,g, or c
ggcacgagtgtagacgaaggctccatatcaccccggactctttcagccattaagagagctcttgacgatgacgangatgtaaaagtgtgtgctggggatgatgtgcagacgggagggccaggagcagaagaaatgcgtataaacagctccaccgagaacagtgatgaaggacttaaagtgagagatggaaaaggaataccgtttactgcaacacttgcgtcatctagtgtgaactctgcagaggagcacgtagccagcactaatgaggggagagagcccacagactcagttccaaaagaacaaatgtcacttgttcacgtggggactgaagcctttccgataagtgatgagtctatgattaaggacagaaaagatcggctgcctctggagagtgcagtggttagacatagtgacgcacctgggctcccgaatggaagggaactgacaccggcatctycaacttgtacaaattctgtgtcaaagaatgaaacacatgctgaagtgcttgagcagcagaacgaactttgcccatatgagagtaaattcgattcttctcttctttcaagtgatgatgaaacaaaatgtaaaccgaattctgcttctgaagtcattggccctgtcagtttgcaagaaacaagtagcatagtaagtgtcccttcagaggcagtagataatgtggaaaatgtggtgtcatttaatgctaaagagcatgagaattttctggaaaccatccaagaacagcagaccactgaatctgcaggccaggatttaatttccattccaaaggccgtggaaccaatggaaattgactcggaagaaagtgaatctgatggaagtttcattgaagtgcaaagtgtgattagtgatgaggaacttcaagcagaattccctgaaacttccaaacctccctcagaacaaggcgaagaggaactggtaggaactagggagggagaagcccctgctgagtccgagagcctcctgagggacaactctgagagggacgacgtggatggtgagccacaggaagctgagaaagatgcggaagattcgctccatgaatggcaagatattaatttggaggagttggaaactctggagagcaacctcttagcacagcagaattcactgaaagctcaaaaacagcagcaagaacggatcgctgctactgtcaccggacagatgttcctggaaagccaggaactcctgcgcctgttcggcattccctacatccaggctcccatggaagcagaggcgcagtgcgcatcctggacctgactgatcagacttccggaaccatcactgatgacagtgatatctggctgtttggagcgcggcatgtctatagaaacttttttaataaaaacaagtttgtagaatattatcaatatgtggactttcacaatcaattgggattggaccggaataagttaataaatttggcttatttgcttggaagtgattataccgargaataccaactgtgggttgtgtaaccgccatggaaattctcaatgaattccctgggcatggcctggaacctctcctaaaattctcagaatggtggcatgaagctcaaaaaaatccaaagataagacctaatcctcatgacaccaaagtgaaaaaaaaattacggacattgcaactcacccctggctttcctaacccagctgttgccgaggcctacctcaaacccgtggtggatgactcgaagggatcctttctgtgggggaaacctgatctcgacaaaattagagaattttgtcagcggtatttcggctggaacagaacgaagacagatgaatctctgtttcctgtattaaagcaactcgatgcccagcagacacagctccgaattgattccttctttagattagcacaacaggagaaagaagatgctaaacgtattaagagccagagactaaacagagctgtgacatgtatgctaaggaaagagaaagaagcagcagccagcgaaatagaagcagtttctgttgccatggagaaagaatttgagctacttgataaggcaaaacgaaaaacccagaagagaggcataacaaataccttagaagagtcatcaagcctgaaaagaaagaggctttcagattctaaacgaaagaatacatgcggtggatttttgggggagacctgcctctcagaatcatctgatggatcttcaagtgaasatgctgaaagttcatctttaatgaatgtacaaaggagaacagctgcgaaagagccaaaaaccagtgcttcagattcgcagaactcagtgaaggaagctcccgtgaagaatggaggtgcgaccaccagcagctctagtgatagtgatgacgatggagggaaagagaagatggtcctcgtgaccgccagatctgtgtttgggaagaaaagaaggaaactaagacgtgcgaggggaagaaaaaggaaaacctaattaaaaaatatgtatcctctataattagttatgacagccatttgtaatgaatttgtcgcaaagacgtaataaaattaactggtrgcacggtaaaaaaaaaaaaaaaaaaaaaaaaaaanaaacaa

SEQ ID NO: 79 - DNA, 1610 bp, Homo sapiens
aattcggcacagggaaacattctggtaatttgtagagatctgttggcatctctgcttcacaaactggaaaaaatcatttgtaagtcttgctaattacttttcttggagaagaaaaaaaatgctacagttgcaaacaaatgtatagttttcaaaaagaagcaacttttttgctccccagtttattcttagtttccagcccacgccttgcgatagsrataggcatagtgatggcctcaattctttctctcttgcatccgtaccttttgctgtgtgactttgcagctcctctcattaaagaggcagagccccctctcccacccataggagcaggttttgagagtaacagaatgaagtgaaaatgacactgtgccagttctaagaccagccctcaaaggttcatgtgtttctgcttgctttcactgtatttgaaatgttgctgtgagaaagacatctctgaaacagctgaatggtcctaagaaaaggatgagagatgcagggagcagagctcccaactgaggccagcctagatcacctaagagccaggcccccagtttactctcatgtgtaagcaataaatgcttaccccagcaataccaccaaggtttgtggttggtttatatacagcattaatgtggcaataggtgcaatacaccctgttaaacaaaccatacacatatgactctaaccctaatcataaattgattcagtctgttcagttccacaacgctgtttcctccagaatctcacagatgacttactaaatccaacacaaatacacctcagactttctgtctagctcccaaccagttaaaagcaattctaaatattttttttcttagtcgtagtgcaaaagtatattctctccctttctctatagttttctctcattttgtcttcagacctagaagcatgagagcccagctgtcaaagtcatctagacccccttcagaaggtcattaaatttgtctatttcacaggattgcaagataaaatacagaatgcccagttraatttgaacttcggataaacaacaaatttttttttagtataagcatatcccatacaatatttgggatatrcttatatttttatattgtttatctgacgttcaagctractgggcatcctgtatttttcttagctaaatctggcaactgtgctatttcattgaaaacctgaaagtgtacaaagaaggaagaagcagaatctgccatatgagtaatagaagtgagcaggcccaggactccctaagtcaagaaaccaagaggcgtcattacggaaaagagtaactcaccctgtgtgctccttggtagttctccctcagcgatgcccccatgttatgaatggggaaaagttcactgaagggttcatagtgaagaaactttttggatgatttctgktggtgggttttggataccttcaagggatcagaaaataatatacttaggaaattttggtaatgtcatcattactctctacattattattatgacggttacaattgttaaatctaggtggtgggtatgtgggttatattgtacatgatttttaacttgtctgcatgtttgaaattataataaagtcaataaataaattattgagacactctt

SEQ ID NO: 80 - DNA, 1048 bp, Homo sapiens
  misc feature (131): n equals a,t,g, or c
  misc feature (997): n equals a,t,g, or c
  misc feature (1021): n equals a,t,g, or c
accagaccaattcgcccaccacaccaaattccggtggataccctcmgtcatgttatcaatcagacgggaggctacagtgatggccttggaggaaattcactgtacagtccacataatttaaatgctaatgnaggctggcaggacgcaacaactccatcttctgtgacttctcctacagaaggcccaggaagtgtgcactcggatacctctaactaatctctggccacacttttccctgagctacatgccttgataagtgcattcagagcaataggaggaaaaggaaagcgtttttgtagcccaccatctacagctttactgtaaaaccttgtcttattcgagaacttggtaaatctgttttttaaggaatcataatcatttgtatttatacttaaaaacacacaatgttaaaaaaaataaagcactttatccaattaggccaagatttaacattgttgacagtcctgtagctattttatcataatttattatcaatattttacattaatggtttcacagttgccaattacttggccttaagggtaaaaagtacaatatacactaaacctcaaccgttaaagcagatgcaaaaattcacctcacctaaattgaacttcttgcatatttccattactgacttggattgtctttctttcatatcactaatggagttggaataaagagctgtttgcctatccctgttaatgatggttgtgtttaagaatcttcctcgtcacgtttgtgttcagatctcttatgttataattagatcagagactggtagcatcgtttctctctctgaaagcaccagtgcccagagtctgctcggtaataaaattatggatccagattgttctgagagacgaagatacttgctgctgatagaggtgaaaacgagattgatccgtctggggttttacggtgtgcactgggtgctgcacagacttgtcaaggtttgcyacgtccyckgggcactgcmaaaggcccgcccccgggntgttgtaaaaatgtagccaaagantatttaaacatcccaccaaccaaacac

SEQ ID NO: 81 - DNA, 1136 bp, Homo sapiens
  misc feature (1124): n equals a,t,g, or c
  misc feature (1131): n equals a,t,g, or c
ccgactcctccgacgccgatccggacagcggcacagaggagggagatttgggacttcccaggacagattgacttttttgaccctacatttgactatgagatgatcttccggggaacaggagcactgatatttgtcattgactcacaggatgattacatggaagccctggccaggctccacctcacggtgaccagggcctacaaagtgaatactgacatcaacttcgaggtgtttattcataaagtggatggtctgtcagatgaccacaaaattgaaacccaaagagatattcaccagagggcaaacgatgaccttgcagatgctggattagaaaaaattcacctcagcttttatctgacaagcatatatgatcattcaatatttgaagcttttagcaaagttgttcagaaactgattccacaactcccaactctggagaatttgctgaacatctttatctcaaattctggaattgaaaaggcatttctatttgatgtggtcagtaaaatttatattgcaactgatagtactccggtggatatgcaaacctatgagctctgctgtgatatgatagatgtggttattgacatctcttgtatttatggtctcaaagaagatggagcaggaaccccctatgacaaggaatccacagccatcataaagcttaataatacaaccgtgctttatttaaaagaggtgacaaagttcctggctctcgtttgctttgtcagagaggaaagctttgaaagaaaagggctaattgactataattttcattgcttccggaaggccattcatgaagtttttgaggtgagaatgaaagtagtaaaatctcgaaaggttcagaatcggctgcagaagaaaaagagagccacccctaatgggacccctagagtgctgctgtaggtgaggtttcaggaatgtcttttgaaatcagaccttatccatgaggctgctgcgccatgttgcactaaaggaagaggaagaaggagattgggacacataccattgatttgttgttaaaaaaaaaaaattcctgcaaccctcttgatcttctcttttataaataaagtaagcactttgaagcaaaaaaaaaaaaaaaaaaaaaaaaaaaaaaaaaaaanggggggnccccc

SEQ ID NO: 82 - DNA, 297 bp, Homo sapiens
  misc feature (28): n equals a,t,g, or c
acagccaacagggggagcagtgcgagcntgaaggcagacagtggcctggcccagtctgatgggagagacccaccgaccctgtggggctggtccctacatctggcgctctgacgtggggctctccctcgctgtgtgaagttgcaccctgagtgcgggatcagcggaggagttcaacgagagattcctgaggattgcagtctataaacttggtgcaggcggctgaccccgcagctyaacaagatcaagaggctgataatcaagcccctcagcccgaaactcaggctgctcagggaaaag

SEQ ID NO: 83 - DNA, 2150 bp, Homo sapiens
aattcggcagagctcacgagagaggatttggcgccctcctctgtggattctggccaggccgggttcggcggttgctgtragagcgggcttcccaacaccatgccgtccgccttctctgtcagctctttccccgtcagcatcccagccgtgctcacgcagacggactggactgagccctggctcatggggctggccaccttccacgcgctctgcgtgcttcctcacctgcttgtcctcccgaagctacagactacagatcgggcactttctgtgtctagtcatcttagtctactgtgctgaatacatcaatgaggcggctgcgatgaactggagattattttcgaaataccagtatttcgactccagggggatgttcatttctatagtattttcagccccactgctggtgaatgccatgatcattgtggttatgtgggtatggaagactttgaatgtgatgactgacctgaagaatgcacaagagagaagaaaggaaaagaaaaggagaaggaaagaagactgaggggcagcagctgcttggagtttgcgtccttcccgtccacccagtgcagctcccagtgctgcagtgtgcgtggcgtgggcatccttccagctgactcatggtttgaaaaaccgttgttttatttaaatatccacagtggtagggcacacactgaagttgcttttcagccagcactgaatgtatccatcaggacatgcgtcttcaggtgcctgatctttgtagtcaggctgtgggaacggtctctgcagagcttcataactgggaatttgatttgaagaagtccatgtcatatgtgtaactagtactaattataaatataaaatacacaatataaaatatgaaactcaataataaacagtgccacctgtacatgggcaccatgccctcctcctcgtgctgtgttttctagtgcatgccacagttcgcagtagagggtgttttcaccttccaagacatggggcaaagtttggagacacctggttgtcactggagggggtggtgctcctggcttctcctgtggagcccggggtgatgcataaaatcctgtgtgcctgggtcagccgcatcacagacaatgacttgacatgaaatgtcagctgtgctgggggcagagagaccttggaaggaagctcttggaaaatacgttgtatctcagtttgatgaaccaattcacaagaggctaggccctctctagcaaagttatgggctgctttactgaaaacagaatggaagccctgaagtcaacactccatggagaagcgtgtctttcctaatgtcctggtgttctgttgatttaggtgcttgggaacacaatgctcccagttctgttaggacaggcatactgttactttgcaatatccactttataaaatagctcctgcccagtggctcttgrttcctgtcaaatgtggacctgtagtttaagaatgacaggtggttagagacccagatatttaaaaataggtgttcaataagggaatactgattgtgcattgtatctggatagcatgcctaattgtgcatttctgaaagttaccaattcaaaatgtaattggaacagttatctttgattagacaagcctgggaagagaatgttgaggtgcagagctcaccagccaagttcatgcccctctcgggcctttgtggctgagaagtgggacagaaagatgattaaggtaatgtgtcctccctgtagcattgtccagggccgttgtgtagatatttgacttcactgacagaaaagaaaccagggagtttgtagagactgtgcatttttagtataacattttcaccatctgatatggtttggctttgtgtccccacccaaattgcatctcaaattgtaatccccatgtgtcaagggagggacctgatgggaggtgatgggatcatgggggtggtttcccctatgttgttatcataatagagagggagttctcacaagatctgctggttttaaagacagcagtttcccctgctgtcactgtctctctcctgctgccttgtgaagaaggtgcttgtttctccctctgccatgattgtaagtttcccgagctccccggccatgtggaactgagtcaattaaacttcttgtttataaagtaaaaaaaaaaaaaaaaaaactcga

SEQ ID NO: 84 - DNA, 601 bp, Homo sapiens
  misc feature (66): n equals a,t,g, or c
  misc feature (505): n equals a,t,g, or c
ttgtgtgccaggggtggtccccagaaggagctgatctgaacaggccggagagtaggaccggccgtnacacccccacacctccagcctcggccccactccttgggctcttaaggtcctgcctcaagaaccacttcctgagtcttagtgtatgtgtgtacaaaagaatgaaagaagtctctagagctaaaggaaggagatycgggctgggctgagaagcatcttccaggatcacggscttcccgcgggacacaccaagcccattccggatcttgctcttcctgaccatggytggcaggytgtggaggaggascggagagcagaagaaaggagtattcatcaggttccttattgtgctgccactagatgccaggcatgtgcttaggcttggggggctgcaaggagaggaagacagcggccctgccctytgytagcaggcagaaccgagttytggccacamtgtgaaggaaaggcagaagcctgcgktggcarytggtttaagctcagngggcagggaaagggaagaggagaatggttttcacggagcagaaggttgtgctcaaggtggaccttggagaataaaggggagagctccagggaacag

SEQ ID NO: 85 - DNA, 534 bp, Homo sapiens
cgcgtcgacgttcctcctaactcctgccagaaacrgctctcctcaacatgagagctgcacccctcctcctggccagggcagcaagccttagccttggcttcttgtttctgctttttttctggctagaccgaagtgtactagccaaggagttgaagtttgtgactttggtgtttcggcatggagaccgaagtcccattgacacctttcccactgaccccataaaggaatcctcatggccacaaggatttggccaactcacccagctgggcatggagcagcattatgaacttggagagtatataagaaagagatatagaaaattcttgaatgagtcctataaacatgaacaggtttatattcgaagcacagacgttgaccggactttgatgagtgctatgacaaacctggcagccctgtttcccccagaaggtgtcagcatctggaatcctatcctactctggcagcccatcccggtgcacacagttcctctttctgaagatcagttgctatacctgacctttcaggaactgccct

SEQ ID NO: 86 - DNA, 1037 bp, Homo sapiens
tgctgactcatctatagaaggaaactacactctgagagttgattgtacaccgctgatgtacagcttggtacacaacctaacaaaagagctgaaaagccctgatgaaggctttgaaggcaaatctctttatgaaagttggactaaaaaaagtccttccccagagttcagtggcatgcccaggataagcaaattgggatctggaaatgattttgaggtgttcttccaacgacttggaattgcttcaggcagagcacggtatactwaaaattggggaaacaaacaaattcagcggctatccactgtatcacagtgtctatgaaacatatgagttggtggaaaagttttatgatccaatgtttaaatatcacctcactgtggcccaggttcgaggagggatggtgtttgagctagccaattccatagtgctcccttttgattgtcgagattatgctgtagttttaagaaagtatgctgacaaaatctacagtatttctatgaaacatccacaggaaatgaagacatacagtgtatcatttgattcacttttttctgcagtaaagaattttacagaaattgcttccaagttcagtgagagactccaggactttgacaaaagcaacccaatagtattaagaatgatgaatgatcaactcatgtttctggaaagagcatttattgatccattagggttaccagacaggcctttttataggcatgtcatctatgctccaagcagccacaacaagtatgcaggggagtcattcccaggaatttatgatgctctgtttgatattgaaagcaaagtggacccttccaaggcctggggagaagtgaagagacagatttatgttgcagccttcacagtgcaggcagctgcagagactttgagtgaagtagcctaagaggattctttagagaatccgtattgaatttgtgtggtatgtcactcagaaagaatcgtaatgggtatattgataaattttaaaattggtatatttgaaataaagttgaatattatatatagttaaaaaaaaaaa

SEQ ID NO: 87 - DNA, 597 bp, Homo sapiens
  misc feature (29): n equals a,t,g, or c
  misc feature (582): n equals a,t,g, or c
  misc feature (586): n equals a,t,g, or c
gcggccctactactactaaattcgcggcncgtcgacaaggagtcctgcttatcacaatgaatgttctcctgggcagcgttgtgatctttgccaccttcgtgactttatgcaatgcatcatgctatttcatacctaatgagggagttccaggagattcaaccaggaaatgcatggatctcaaaggaaacaaacacccaataaactcggagtggcagactgacaactgtgagacatgcacttgctacgaaacagaaatttcatgttgcacccttgtttctacacctgtgggttatgacaaagacaactgccaaagaatcttcaagaaggaggactgcaagtatatcgtggtggagaagaaggacccaaaaaagacctgttctgtcagtgaatggataatctaatgtgcttctagtaggcacagggctcccaggccaggcctcattctcctctggcctctaatagtcaatgattgtgtagccatgcctatcagtaaaaagatttttgagcaaamaaaaaaaaaaaaaaaaaaaaaaaaaaaaaaaaaaaaaaaaaaaaaaaaaaaaaaaaaaaaaaaaaaaaaangggnggccgctctag

SEQ ID NO: 88 - DNA, 474 bp, Homo sapiens
aatccttaacctcctgcattttagaaatactccagagcttgtcttattcttaccaaaattcctgtaggcctttgactcctgactcaccctgtctgcagtgtcccccagcctgcaggggtgggtgwgtcacagcaaccctcagccaccagctgttttccatctgccggccttcctgggggagagtcccttccagctgtagcccctgtctatgggaaaagtctcatgtccttttcatctctccccactgcacactgtctctcaccctagactataattcaagtgaatttgacctccatttattggacaagccaggsactgtgctaggrataatgwaaaccattagacaaatctgaaagggagggatcactagactaaggggtagaaatgtggagatgggagtaactttctgcatgtctttgcaggaggtggcatgtgagaaagctttttggaagaggtggcacctggagctgtgga

SEQ ID NO: 89 - DNA, 1537 bp, Homo sapiens
agactttgaaatcagaggaattccagaagaggctgcacccttataaggattttatagctaccttgggaaaactttcaggattacatggccaggacctttttggaatttggagtaaagtctacgaccctttatattgtgagagtgttcacaatttcactttaccctcctgggccactgaggacaccatgactaagttgagagaattgtcagaattgtccctcctgtccctctatggaattcacaagcagaaagagaaatctaggctccaagggggtgtcctggtcaatgaaatcctcaatcacatgaagagagcaactcagataccaagctacaaaaaacttatcatgtattctgcgcatgacactactgtgagtggcctacagatggcgctagatgtttacaacggactccttcctccctatgcttcttgccacttgacggaattgtactttgagaagggggagtactttgtggagatgtactaycggaatgagacgcagcacgagccgtatcccctcatgctacctggctgcagccccagctgtcctctggagaggtttgctgagctggttggccctgtgatccctcaagactggtccacggagtgtatgaccacaaacagccatcaaggtactgaggacagtacagattagtgtgcacagagatctctgtagaargagtagctgccctttctcagggcagatgatgctttgagaacatactttggccattacccccagctttgaggaaaatgggctttggatgattattttatgttttagggacccccaacctcaggcaattcctacctcttcacctgaccctgcccccacttgccataaaacttagctaagttttgttttgtttttcagcgttaatgtaaaggggcagcagtgccaaaatataatcagagataaagcttaggtcaaagttcatagagttcccatgaactatatgactggccacacaggatcttttgtatttaaggattctgagattttgcttgagcaggattagataaggctgttctttaaatgtctgaaatggaacagatttcaaaaaaaaaccccacaatctagggtgggaacaaggaaggaaagatgtgaataggctgatgggcaaaaaaccaatttacccatcagttccagccttctctcaaggagaggcaaagaaaggagatacagtggagacatctggaaagttttctccactggaaaactgctactatctgtttttatatttctgttaaaatatatgaggctacagaactaaaaattaaaacctctttgtgtcccttggtcctggaacatttatgttccttttaaagaaacaaaaatcaaactttacagaaagatttgatgtatgtaatacatatagcagctcttgaagtatatatatcatagcaaataagtcatctgatgagaacaagctatttgggcacaacacatcaggaaagagagcmccacgtgawggagtttytctagaagctycagtgataagagatgttgactctaaagttgatttaaggccaggcatg

SEQ ID NO: 90 - DNA, 304 bp, Homo sapiens
  misc feature (33): n equals a,t,g, or c
  misc feature (292): n equals a,t,g, or c
tgacaccatgcctggttaatttttttaattttnattttcagtagagacaaggttgcgctatgttgcccgggctggtatggaactcctgtgcttaagcggtcctcatgcctcggcttcccaaagtgctgaggttgcagctatgagccaccgcacccagcctacattccttcttatcaccgagaaacaggttgatcttcacaggtgtaatgagtatgaagggagtgccataaagatattttttattttttatttatttattttttaatttaatttttttttttttgggatgggngtcttgctctgg

SEQ ID NO: 91 - DNA, 369 bp, Homo sapiens
  misc feature (46): n equals a,t,g, or c
ggtagagatggggtctcgtcatgttgaccaggctggtctcaatctnctggtctcaggccatccttccacctcattctccccaagaactgggattacaggcatgagcaactgcacctggtccatatgcttcttatagttgaagaagtgaagggtcaatgactttactaaaatactattaaagtaataaagctaggacttagccccaattattcatccttaaagtccaatactttcaatatattaagttgctctttattatatgaattctaaatatcttttttaccttttgttatctaatctggaaatcctatataaatgtataattttatacatgctgactgatatccyctctagtcttgctatactagg

SEQ ID NO: 92 - DNA, 315 bp, Homo sapiens
gctttttaccctctccaaaccttctaaccctagcttcatgaatttatgttactcgcctagagggctctctataaatatatacatttgtaacttctgtttaatataaataaatcattcttcatagcaaggattctggcatcagttggagattctttggatggatgtgctcccatggagtttctattttaatgtactaacaacttatgactcgtctatctgtagtatcaattatatccactatcacagtaacagtcaccacttaatatgyatagratatctcattttaccaagcaattatggtatctctgatttata

SEQ ID NO: 93 - DNA, 701 bp, Homo sapiens
aacattacaagggcttttataaaaaaccctttgttcatatttcttccctttaaaatatgtaatgtcaaaaatgactcaccttttaaaaattatgcatgaaaacaggtggtaaacattcagtaatacgctatttctccaacatcaagacaactaaaacaaatgataaaaatgtttatttttacactccagcatatcgggtgagttttagggatgtgtatgaatatttaaatcttttaatttcagttttaatgaaagctgaacttaatagggaaagctagctcttggtaactagcaatgatcaggcattgtttgcctctgtcaggttttcttatctgttttaggtacattttttcagattctgattgtttgagttaatggttgaatttttaaagtttttagttacttaaaatakgattttaaattrcatattaatttagaaaattcctgtgtttacttatattttaaattgtgaaatggatccaatcattagaacagagagaatagttctttgaaactgaaatactttagttttactgaccttgtgtaaagataatatgaagaaccagcttccaaaagaaaccagcatatggcactataaactatttcatttgagcaccattctttaccatggatatattaattatgtattatagtggagtgatcatacagktcccccaaatgtgatggttcaagggaattta

SEQ ID NO: 94 - DNA, 459 bp, Homo sapiens
cgggcaactctctggcatccttaatattcttctatagaaattgtgatgaaagaacagataagcctaagtaaatctagcgtgtggagctcctttaaaatgtgaagaccttgccawctggttaaaaataaaacttggttttgtcctaaatatccttgctgggcctattatacataaaaaaaggggccacagcccatttgcaaggcttctgaatgaactccattcattctgtacttggaaatgtctcttcagccacaaaaagaacaatagttataacctaatttctttggtgccatatcagcagaagaagagccaagagaccattatgaaaactctagtaagttctcttggtgattatataatgctgtawtcattgatcatattkctgtatttaaataagtacattttttaaaacatcataaagtggatcagtaatgctgtaatatcacatttcatgtatta

SEQ ID NO: 95 - DNA, 2589 bp, Homo sapiens
  misc feature (1056): n equals a,t,g, or c
  misc feature (2568): n equals a,t,g, or c
ggcacgagggctgcccctttgggttccagccggggtcacgtccagcctccactgggaaaccagtgactgaggcctggacccagaggtggaccaggcatctcctggccacctgtgacctgggaagaagcgagtcagtggcccgttcaacctgctctgcagctgctataaatagcctccctgtttccaagaggaggtaaggaagtgtttatcttctaaaaaccagacgtttcctgatgctctgagcgttactcagtgctacagaggagatgcacacgtccccactatgttctgtcttgagaaggggacaagagaaagaggaaaaggagccactgtactttattttgcacctacagcgtgccttggcactgggctagagaggcaccttcctgcgtgaatcctgtgcggcaggtcttattgccataataagtcacatcaaagacactgctggtcataaaacactgttttacataccatagggaaaaacgctgccaatcttaactaagatgctacaactgtacagttccttccaatcagagatgttcacgtgtgaaaaaaaaactgtgctacttacaatctatgaaagctggtrttatcccacttggcaggtaagggaactgaggtcctgtgagtgaagtgacctcatgatcacacaacaggagatggcagggctgggattcaaacccgggagtgtctgctgccacatcccacactcccactgcctggctccaagtcccaggaagctcgagactgtgagttttctcccttgaaactcacctggagagagtccgggcacctgtgcctatgtggagggttccagccccagccaggcccctccgctgcccacaccctgggaggagaagcggcctcccttccaggctcatctgctcactgcccgcattctcctggcagagctgaggtctgagagatctggactccaacccaagggccctctcttgttattcaggggtgtccacagttaggragggacctggggccttgtcccaccaccttcctaggccccgtgatcaccaccccctcaagcggggccccagcccnctgagcaccccctcacgtgacccagccctcggctgttccaggctcactgcccatggtgtgctcttctgggccacagcagccagggctccagggcgaggacrggggacacctgaaaacaccccgttgttcatggtcttgtgcccattcattcggagactcctgaaaaactgggctgtttgcaaagcaaatccagctccttgtcctagcaggttctcagaamggggagtcccctgggaatggagctgctcccctcacggcagcaccacgtttccagtccctcgatgccactaatcagcatggactgtgttcaggacacagggtgaacttttctctgacccccggtgctggtcctgtgccagcacgtagtagttamtcagtagaggtttgctgagtaaaccagaaatcagattatgagtgttcaggggtttgataaaacagcaccacataacgcacacaaagatactccagaaacatttgctgagtacctagtacgtgtgaggtgctgtgaggatagagcagagaggactgtgccccagctgtgatgctggcagaggtgacactaagagggaaatgagatatttggggcagaatccactgggctctcttggccatccgctgccttgggtctgttgaggtgggtgcccaaaggctgccttcttgaccagaacctgctgtgcgcttcacagaacctcctcttcattggaaatgctgggcacattgcagtcagtgagctgctgccaaaacggcgttaagtagaacccccagaggccccgccggttggtgatcaccctcaggtcctgccagggagacacagtgaggaggttggctaattgctgctttcaggccctggaaatcagtcgccaaggcccaggagaaccccggtgagtccgtccagttgaggcagaggcaataacctcccattgctcggccctgcgcctgccccagtcctggcagggggcaccggctcaggaacatgcggcctcctggmatttctcggtatttaactgtctcgctgtcttatccgagtccctaatgaaacgacttgtgtgacaatctgtctgtgccttacgaaagtgtctgtgcactttttatcctttttaaaagcaacttttaaaagtggatggggaggggggctagcatacgtggtagggttctagaaatctgtggtcatcgctgaaatcctttttgcatcatgttttttgatgttggagtgatgaagtgtacatcccccaccccacacaccactacctgtgtacagaccttttaaaacatgtcttctttttctgattcaatactgtgacctctccgatacagtctaatccttggggatctgtaatcaaggttttaaaacctgggaagtgggttgggaagggtttgcactggtcttgagtgttgtgcttttctgtgttgtgtgttttgatttttgtctttttatctgttttatattgacataattttcctgtttaaaaaaatacaactttggcttgttaaaaaaaaaaaaaaaaaaaattnctgcggtccgcaagggaattc

SEQ ID NO: 96 - DNA, 457 bp, Homo sapiens
  misc feature (372): n equals a,t,g, or c
  misc feature (384): n equals a,t,g, or c
  misc feature (442): n equals a,t,g, or c
gagcacatctggctctccatatgggaccggccgcctcgtagctgtttcactcgcatccagagggccacctgctgcgttctcctcatctgyctcttcctgggcgccaacgccgtgtggtacggggctgttggwgactctgcctacagcacggggcrtgtgtccaggctgarcccgctgagcgtcgacacagtcgctgttggcctggtgtccagcgtggttgtctatcccgtctacctggccatsctctttctcttcyggatgtcccggagcaaggttatcaatactctggctgaccatcgtcatcgtgggactgactttggtggaagtccttggttacttatcattaactgtgtttctgagaagttataaatntggcatctcctnctgcacaacttacctttgggttataataatctggtgaccatcgtcacgttggactgantttgggggaagcctt

SEQ ID NO: 97 - DNA, 516 bp, Homo sapiens
agctcccaccagcctcctttttatttttttgtacagatggggtcttgctatgttgcccaagctggtcttaaactcctggcctcaagcaatccttctgccttggccccccaaagtgctgggattgtgggcatgagctgctgtgcccagcctccatgttttaatatcaactctcactcctgaattcagttgctttgcccaagataggagttctctgatgcagaaattattgggctcttttagggtaagaagtttgtgtctttgtctggccacatcttgactaggtattgtctactctgaagacctttaatggcttccctctttcatctcctgagtatgtaacttgcaatgggcagctatccagtgacttgttctgagtaagtgtgttcattaatgtttatttagctctgaagcaagagtgatatactccaggacttagaatagtgcctaaagtgctgcagccaaagacagagcggaactatgamaagctctcctgccatctccaagcccacttttcag

SEQ ID NO: 98 - DNA, 314 bp, Homo sapiens
  misc feature (263): n equals a,t,g, or c
  misc feature (271): n equals a,t,g, or c
  misc feature (299): n equals a,t,g, or c
ggagaccgcgcgcgggacggggaggaatggcctgtccgcgttaaaccatcacaagccatggttgcggaagggccacgcgtcccccagtaggagaatgactccgattcgtgaccctcagcgccggtgcatgtcgatcttggcccccagggctgtgatgcagccagccaggtctcagggagagggaacccagaagcctggcatgctggccaaaggagtcaaggaaacttttgagctatttacagcttgtagcaattatgtaaagnatactccnctgaacaaaatttggagcatgtttgttnctctctacctgattt

SEQ ID NO: 99 - DNA, 679 bp, Homo sapiens
agttgttccgtgtaggctgttgttgactctcgtatgaaagcccacgcgatccaagtgccctgcaggttttggtccagggaaaagttggtctctgcagatgactgtaaatgactacctggaggtcgattaaagtgcggtactgcgggattcarccgatttccttcttcctctgactgcccggaaatatcagccaaaggccagcgttctaaggacatatggaattggctatggataattcatatgctttcaatcaacgaagcacatgtaatggaattccatctgagaagaaaaacaacttccttgtatcagaagatcatggacaaaaaatcttaagtgtactacagaattttagagaacaaaatgtcttttatgatttcaaaataattatgaaagatgaaataatcccgtgtcatcgttgtgtgttagcagcatgcagtgactttttcagggctatgtttgaagtaaacatgaaagaaagagatgatggaagtgttaccattactaatttgtcctccaaggcagtaaaagcatttctcgattatgcctatactggaaaaacaaaaataacagatgataatgtggaaatgttcttccagttgtcatcatttcttcaagtttccttcctatccaaagcttgcagtgactttttaataaaaagtattaatcttgaaaaaaaaaa

SEQ ID NO: 100 - DNA, 599 bp, Homo sapiens
  misc feature (583): n equals a,t,g, or c
  misc feature (584): n equals a,t,g, or c
  misc feature (599): n equals a,t,g, or c
aattcggcacgagtctcacccctcggagacgctcgcccgacagcatagtacttgccgcccagccacgcccgcgcgccaccaccatgctaggtaacaagcgactggggctgtccggactgaccctcgccctgtccctgctcgtgtgcctgggtgcgctggccgaggcgtacccctccragccggacaacccgggcgaggacgcaccagsggagggacatggccagatactactcrgcgctgcgacactacatcaacctcatcaccaggcagagatatggaaaacgatcyagcccagagacactgatttcagacctcttgatgagagaaagcacagaaaatgttcccagaactcggcttgaagaccctgcaatgtggtgatgggaaatgagacttgctctctggccttttcctattttcagcccatatttcatcgtgtaaaacgagaatccacccatcctaccaatgcatgcagccactgtgctgaattctgcaatgttttcctttgtcatcattgtatatatgtgtgtttaaataaagtatcatgcattcaaaaaaaaaaaaaaaawaaaaaaaaaaaaaaacnngggggggggccccgn

SEQ ID NO: 101 - DNA, 1189 bp, Homo sapiens
  misc feature (232): n equals a,t,g, or c
gggggcgggaaggcgtgaccgccatgcacaagctctttgactgggccaataccagccggcgcgggaggagataagcaaggacctcagagccacactgaacgccttcctgtaccacatgggccaacacagcaacaaattcatgctggtcctggccagcaatctgcctgagcagttcgactgtgccatcaacagccgcattgacgtgatggtccacttcgacctgccgcagcangaggagcgggagcgcctggtgagactgcattttgacaactgtgttcttaagccggccacagaaggaaaacggcgcctgaagctggcccagtttgactacgggaggaagtgctcggaggtcgctcggctgacggagggcatgtcgggccgggagatcgctcagctggccgtgtcctggcaggccacggcatatgcctccaaggacggggtcctcactgaggccatgatggacgcctgtgtgcaagatgctgtccagcagtaccgacagaagatgcgctggctgaaggcggaggggcctgggcgcggggtcgagcaccccctatccggagtccaaggcgagaccctcacctcatggagcctggccacggacccctcctacccctgccttgccggcccctgcacatttaggatatgctcctggatggggactgggctgtgcccagggcctctgtcccccaggatgtcttgtggtggcggtcggccgttctgccccccagggcaccccctgttgtaggcactggctagggaggggcaggcctccttcctgcccctcgagacactcttgggagatgcattttccgtctggctcacagggggagggtgaggctttgtaccccagcccctgcccaggccactgtgagggtgggtgctggctgagcccctggggcagaaggagtggggcaggcggggtctttgttctcggctcccacagcagagccaggtgagggggggcctgccaggactagacagaagtggggcggcctgaaccctgcttccagccatggccaggggccacggaacccggcaggggtgtctgaggccgccctgtcagctggccggtccaagcctgtggctggagctggtgtgtgtttatctaataaagtcccacaggtgcctcaaaaaaaaaaaaaaaaaaaaaaaaaaaaaaaaaaaaaaaaaaaaaaaaaaaaaaaaaaaa

SEQ ID NO: 102 - DNA, 251 bp, Homo sapiens
  misc feature (42): n equals a,t,g, or c
gccaatttgatgaagtgcaaagttcaggccggtatgattttnagtgtctgcaaagataaaagcttcgatgatgaagaatcagtggatggaaataggccatcatcagctgcatcagccttcaaggttcctgcactaaaacatccggaaatcctgccaacagtgcaaggaagctggttcagcaggtggccctaaggttkgaggttstaaatccatttcaatctgttatgctggtccatggccttgatattggc

SEQ ID NO: 103 - DNA, 458 bp, Homo sapiens
gggaggctttctgaattatgggggcaacatggggagactgggctttctgtggaccatgacagctccgcagccgtgctgggctcctcagctccactgtcagggctaggaattggccacagaacccccagagccaaccctggggcccactaggaccccaaacacctgtgttttcattctgcgtggcctcctggttccctggagttcttttttatgctgcctctggtgtgaggtcctcagcatttaatttgttctaagtttaaaagctgcaagagcaaaacagaacccccaaagcctggggcccacagctgctgcggctgatcagagatacgaccccagaggaccacgtccaccargggccggatggacagccacctattttgtamtccttgtttcaaaagcaacaatagcaaataacattccaaaagttctatgatragacttcaagacactaggattta

SEQ ID NO: 104 - DNA, 439 bp, Homo sapiens
  misc feature (360): n equals a,t,g, or c
  misc feature (402): n equals a,t,g, or c
tgtgtgtccgcgcaggcgagcaccgcgccggccctgagcctcccgctcgctccccacggccgcggtgcatgttcgcctcctgccactgtgtgccgagaggcaggaggaccatgaaaatgatccactttcggagctccagcgtcaratcgctcagccggagatgagatgcaccatccggctgctggacgactcggagatctcctgccacatccagagggaaaccaaagggcagtttctcattgaccacatctgcaactactacagcctgctggagaaggactactttggcattcgctatgtggacccagagaagcaaaggcactgggcttgaacctaacaagtccatcttcaagcaaatgnaaactcatccaccatacaccatgtgctttagagtgaatttanccacatgaacccttgaagattaaagaagactcacaag

SEQ ID NO: 105 - DNA, 233 bp, Homo sapiens
tcccaaagtgtggggattataggcatgagccactatgcccagcctacttttgtttttaagaaattgaaacgatatagaaaagtacaaagaacaacctaataaacactcatattcccaccactcagaattatcaactttttatcattttatcatatttgcttcagatcttttttttttttaaagaaaagtataacagatttagctaaagtaccctttgaccaataccccacccc

SEQ ID NO: 106 - DNA, 704 bp, Homo sapiens
  misc feature (704): n equals a,t,g, or c
ggcagcggtggccgaggcctcttggttctgcggcacgtgacggtcgggccgcctccgcctctctctttactgcggcgcggggcaaggtgtgcgggcgggaaggggcacgggcacccccgcggtccycgggaggctagagatcatggaagggaagtggttgctgtgtatgttactggtgcttggaactgctattgttgaggctcatgatggacatgatgatgatgtgattgatattgaggatgaccttgacgatgtcattgaagaggtagaagactcaaaaccagataccactgctcctccttcatctcccaaggttacttacaaagctccagttccaacaggggaagtatattttgctgattcttttgacagaggaactctgtcagggtggattttatccaaagccaagaaagacgataccgatgatgaaattgccaaatatgatggaaagtgggaggtagaggaaatgaaggagtcaaagcttccaggtgataaaggacttgtgttgatgtctcgggccaagcatcatgccatctctgctaaactgaacaagcccttcctgtttgacaccaagcctctcattgktcagtatgaggktaatttccaaaatggaatagaatgtggtggtgcctatgtgaaactgctttctaaaacaccagaactyaamctggatmakgttsagaggactataaactgccttcatn

SEQ ID NO: 107 - DNA, 445 bp, Homo sapiens
  misc feature (426): n equals a,t,g, or c
ggaataccccctcacttctgtggcttctttcctgtagtagacgatcaagggtggaatctacagtccatgggccctgacttcttgccttcgtctcaaatagactctgcagccagccatctatgcagcgccccagtggctttgaaatgcaacagaaaccatcacccccggaccatgggctccatgccagtgggcaaagcacaggtgcgttcactgagttcccagcacatagctgtggcaggcacttggtgatattttgaaataaaagaatggaagaatgtgtccaagctgtgcttcccctttctaccttactcagggacatggtgccctcctctctggttycctgccctgtgccamcccccgscccctgcaagcacagytcttatgtgcaaagcccctgtaagtgctggagggattactgatggcttnggggaagtggcaatgggat

SEQ ID NO: 108 - DNA, 592 bp, Homo sapiens
accaaaactgcacaaagatagaaacagggacttctgtgctccttgagcttcacgtgttaacctggctccccagaccaaagaccaacaccgcagggtgagttcatcctctgccaacagcaatctttcccttcctctgaggccagccatccccatcccaggaggcaggggaagcaagcccggggagggcaggagagctcccagctcagtgaagcagctccaccggccccgaagcacctcccttgctcacagctcrgascccagcttctccctgctgcmaagrtaactgcagcyttcagactgacttccatgcccctctagctagggsccatcacttcaagttcaggcgccaaaaaccaagaaagtaaatcacacttcatagactttatttaccttaaaaaattcctgagttcattcatgtctccaaaccactagagaacctgaaaattcaccaggaaattgggcaactgcaagttatcctggagactccagagtcaacacttcattaaatgagaacaatctggttcatgcgttgaagctgttacagtaatcagggcgacatgggcaggggaagcgatttttctgaagctgtgcc

SEQ ID NO: 109 - DNA, 381 bp, Homo sapiens
tcaccttgtagagaagaaagtcaacagataatttctaaattggaaaatcaggaaattacagtcattataagagatatatggggaggatataaataccagaataaaaagataaaagagatgaaaatagtagtctctggggagctaaagtctaaaatacaaaggtgtgaggcagaccttatatactacttaacttgtatactatttatagcccagtattctgttttctagacctgtccaggtgttaagggatccaatctatgaaccagcagagacccaatgactaaagmcaaactttgctgcacactgaaatcacctgggggaatcttttaaaaagtactgacgcctgactcccacccacaaacagtctgatttaattgggca

SEQ ID NO: 110 - DNA, 351 bp, Homo sapiens
  misc feature (253): n equals a,t,g, or c
  misc feature (322): n equals a,t,g, or c
ctgtccctgcactccgtggcggaaggcggctagagcggctccctctgagctctccgagagattggtcgggacctgaagcgttgaggttaagggcaaggcaaggagcaacgaggagtttttcgttacgttagaaaaatttcgttgcgtgctgaaagcgcttttacctgtgttgtatgatttaaccttatgaaaatggacagtatttccagttttacaagtgaggaaagaagattaagaaacttgcctccgccangcgtggtggttcactccctgtaatcccagcactttcggcggccgaagcaagcggatcacttgaggtcangagttcgaagaccagcctgggccaaacat

SEQ ID NO: 111 - DNA, 1583 bp, Homo sapiens
gggggccgcaggagatgacggccggcggccaggccgaggccgagggcgctggcggggagcccggcgcggcgcggctgccctcgcgggtggcccggctgctgtcggcgctcttctacgggacctgctccttcctcatcgtgcttgtcaacaaggcgctgctgaccacctacggtttcccgtcaccaattttccttggaattggacagatggcagccaccataatgatactatatgtgtccaagctaaacaaaatcattcacttccctgattttgataagaaaattcctgtaaagctgtttcctcwgcctctcctctacgttggaaaccacataagtggattatcaagcacaagtaaattaagcctaccgatgttcaccgtgctcaggaaattcaccattccacttaccttacttctggaaaccatcatacttgggaagcagtattcactcaacatcatcctcagtgtctttgccattattctcggggctttcatagcagctgggtctgaccttgcttttaacttagaaggctatatttttgtattcctgaatgatatcttcacagcagcaaatggagtttataccaaacagaaaatggacccaaaggagctagggaaatacggagtacttttctacaatgcctgcttcatgattatcccaactcttattattagtgtctccactggagacctgcaacaggctactgaattcaaccaatggaagaatgttgtgtttatcctacagtttcttctttcctgttttttggggtttctgctgatgtactccacggttctgtgcagctattacaattcagccctgacgacagcagtggttggagccatcaagaatgtatccgttgcctacattgggatattaatcggtggagactacattttctctttgttaaactttgtagggttaaatatttgcatggcagggggcttgagatattcctttttaacactgagcagccagttaaaacctaaacctgtgggtgaagaaaacatctgtttggatttgaagagctaaagagtctgcagcaggattggagactgacttgtgactgcgggctgggggggcattcccagtaggaatgtgaagccagaggtttcggattcgtgacatccaccccctgggcaagtgagagcatctgcaaaatgcaaagagaactacctcatatgcaggatgagccaatggcagtctcaagaaatgtactcgggcgacaccttacctgtggaaagcaaatcttttcaaaataagccactgggactcggtaggtggagccccagctgctcttctagggacctatggggccttcgtggcatctctgtgctgtgtgctggggaggaggttgatgtaatggtgactcttttctgatcagcaccttggccgtgattcccaaggtcccagccaaagcaaagggccagttgtttcagtttaaacagacatgtctttagtctaataaaattagttaactgccagtaaagttatttgttagctttgatgaaagctatgttggtatctttccctaatcatcaaagtaaataaaaaatcatttctaaaaaaaaaaaaaaaaaactctga

SEQ ID NO: 112 - DNA, 431 bp, Homo sapiens
  misc feature (388): n equals a,t,g, or c
  misc feature (408): n equals a,t,g, or c
  misc feature (422): n equals a,t,g, or c
ccggcagctagagcagctactgactctgtttcagccatcttcgataaaggcaaaaaggtaagggaaagtttccaagctttaggaagaattattttttttcaagacgctgtcttccgtactttcgttattaaacatacggctcaagtgatcaccggtatagacagtgacatcagacatctttcattagccctactcaaaaatggcggcaacgtaatatcctgggccggagtcggttgtaacccggaagtgcctttgtaaaggaggggtggttagacaatccggaartggatggaatgaagagatgccacttggcggcccatggcagctgttagtatcggcgactccgggtmaaggcccgktcsagttgcattaccatggggcagcaccnggttttaggggcagggacanttttgttgttcaanttgttgctg

SEQ ID NO: 113 - DNA, 2842 bp, Homo sapiens
  misc feature (2040): n equals a,t,g, or c
  misc feature (2603): n equals a,t,g, or c
  misc feature (2656): n equals a,t,g, or c
ggtggactcggagtccgcgagcgtcgtcggcaagcggccgcctttccacggtactccgagcactatgtcgtccccggcgtcgaccccgagccgccgcggcagccggcgtggaagggccacccccgcccagacgcctcggagtgaggatgccaggtcatctccctctcagagacgtagaggcgaggattccacctccacgggggagttgcagccgatgccaacctcgcctggagtggacctgcagagccctgctgcgcagrrcgtgctgttttccagccctccccaaatgcattcttcagctatccctcttgactttgatgttagttcaccactgacatacggcactcccagctctcgggtagagggaaccccaagaagtggtgttaggggcacacctgtgagacagaggcctgacctgggctctgcacagaagggcctgcaagtggatctgcagtctgacggggcagcagcagaagatatagtggcaagtgagcagtctctaggccaaaaacttgtgatctggggaacagatgtaaatgtggcagcatgcaaagaaaactttcagagatttcttcagcgttttattgaccctctggctaaagaagaagaaaatgttggcatagatattactgaacctctatacatgcaacgacttggggagattaatgttattggtgagccatttttaaatgtgaactgtgaacacatcaaatcatttgacaaaaatttgtacagacaactcatctcttacccacaggaagttattccaacttttgacatggctgtcaatgaaatcttctttgaccgttaccctgactcaatcttagaacatcagattcaagtaagaccattcaacgcattgaagactaagaatatgagaaacctgaatccagaagacattgaccagctcatcaccatcagcggcatggtgatcaggacatcccagctgattcccgagatgcaggaggccttcttccagtgccaagtgtgtgcccacacgacccgggtggagatggaccgcggccgcattgcagagcccagtgtgtgcgggcgctgccacaccacccacagcatggcactcatccacaaccgctccctcttctctgacaagcagatgatcaagcttcaggagtctccggaagacatgcctgcagggcagacaccacacacagttatcctgtttgctcacaatgatctcgttgacaaggtccagcctggggacagagtgaatgttacaggcatctatcgagctgtgcctattcgagtcaatccaagagtgagtaatgtgaagtctgtctacaaaacccacattgatgtcattcattatcggaaaacggatgcaaaacgtctgcatggccttgatgaagaagcagaacagaaacttttttcagagaaacgtgtggaattgcttaaggaactttccaggaaaccagacatttatgagaggcttgcttcagccttggctccaagcatttatgaacatgaagatataaagaagggaattttgcttcagctctttggcgggacaaggaaggattttagtcacactggaaggggcaaatttcgggctgagatcaacatcttgctgtgtggcgaccctggtaccagcaagtcccagctgctgcagtacgtgtacaacctcgtccccaggggccagtacacgtctgggaagggctccagtgcagttggcctcactgcgtacgtaatgaaagaccctgagacaaggcagctggtcctgcagacaggtgctcttgtcctgagtgacaacggcatctgctgtatcgatgagttcgacaagatgaatgaaagtacaagatcggtattgcatgaagtcatggaacagcagactctgtccattgcaaaggctgggatcatctgtcagctcaatgcgcgcacctctgtcctggcagcagcaaatcccattgagtctcagtggaatcctaaaaaaacaaccattgaaaacatccagctgcctcatactttattatcaaggtttgatttgatcttcctcatgctggaccctcaggacgargcctatgnacaggcgtctggctcaccacctggtcgcactgtactaccagagcgaggagcaggcagaggaggagctcctggacatggcggtgctaaaggactacattgcctacgcgcacagcaccatcatgccgcggctaagtgaggaagccagccaggctctcatcgaggcttatgtagacatgaggaagattggcagtagccggggaatggtttctgcataccctcgacagctagagtcattaatccgcttagcagaagcccatgctaaagtaagattgtctaacaaagttgaagccattgatgtggaagaggccaaacgcctccatcgggaagctctgaagcagtctgcaactgatccccggactggcatcgtggacatatctattcttactacggggatgagtgccacctctcgtaaacggaaagaagaattagctgaagcattgaaaaagcttattttatctaagggcaaaacaccagctctaaaataccagcaactttttgaagatattcggggacaatctgacatagcaattactaaagatatgtttgaagaagcactgcgtccnctggcagwtgatgatttcctgacagtgactgggaagaccstgcgcttgctctngaagccttgtgagcaaggaaggctccctgcatgtcctgcttgctgcacgccacatgggtgtggtctgcatctcagttggccgccatcagtgtaaatagagcttaaagtcatggtttggctgcataaaaattttctaacttgggttcaatatttgtagtgaagtatctgttttcatttttttcacgt

SEQ ID NO: 114 - DNA, 268 bp, Homo sapiens
attttgctgctggtgggttgggctacagcaggcctctggagccacaccagggcacgggagtgggtgcagggaccgtcaccgcgccttcacacgcaccatagtgcccggctaattactctgcttttatgagccaaggtgttcccgaaagtggarccagcgccacgcgtctcyaaggtctccatacccagccttcgtccctgcggtgcccaaaagccttgcgcgcattttgcatttgggaaaaaaagtcctgaatgcgaacgtcacccca

SEQ ID NO: 115 - DNA, 800 bp, Homo sapiens
  misc feature (673): n equals a,t,g, or c
  misc feature (794): n equals a,t,g, or c
gcgtcggggcttcggaggcgtgcgggcttcggaggcgtgcgggcttcggaggcgwgcgggcttcggaggcgtgcgggcttcgggtgccatggggactcctcccggcctgcagaccgactgcgaggcgctgctcagccgcttccaggagacggacagtgtacgcttcgaggacttcacggagctctggagaaacatgaagttcgggactatcttctgtggcagaatgagaaatttagaaaagaacatgtttacaaaagaagctttagctttggcttggcgatattttttacctccatacaccttccagatcagagttggtgctttgtatctgctatatggattatataatacccaactgtgtcaaccaaaacaaaagatcagagttgccctgaaggattgggatgaagttttaaaatttcagcaagatttagtaaatgcacagcattttgatgcagcttatatttttaggaagctacgactagacagagcatttcactttacagcaatgcccaaattgctgtcatataggatgaagaaaaaaattcaccgagctgaagttacagaagaatttaaggacccaagtgatcgtgtgatgaaacttatcacttctgatgkattaraggaaatgctgaatggtcatgatcattatcagaacatgaacatgtaattcagntgataaagtccaagccagataaggccttaacttgataaaggatgatttttttgacaatattaagaacatagttttggagcatcagcagtggcccaaagaccgaagaatccatccttaaggncaaaac

SEQ ID NO: 116 - DNA, 646 bp, Homo sapiens
  misc feature (556): n equals a,t,g, or c
  misc feature (592): n equals a,t,g, or c
  misc feature (615): n equals a,t,g, or c
  misc feature (645): n equals a,t,g, or c
aacaaaggcattgccatctacaagaaggatttcttcctggtgcagaagctggtgagctgggctctgtttcagggcaaatgagggccaggagctgcctgtgtgactttggggctccctctgccagtgaccaatccctcttaaaaagcagtcaggtcaatgctactgagtagcctcagagagaatttcctaaacaatacaagaaagagaaagataggtctcttttcccttttggttctaagcatcctttcctcacttcagggtagggtggccaagctctggggtctcaatccagaaggaggcctaagtgggcatcagacttaaaataggcaggaggaagatgcggaggagggtggcaaktagaggtgagccattccccagaggaagatgcagggggagggcaccctggggtgaaggccactgagagccagcaagtgcctgcggactgacctgggggcctctgcccacttcctttgacccagagttgccttccagtaactcagctgttcaagcccacattccctaagatttatcttgtcctctctcccatattcttctnggaaaagcagatgctttgctaatcccaaggaattgnattttttccagccctgttttcanaaaatctggggctttggggaaaaaaaattnt

SEQ ID NO: 117 - DNA, 1534 bp, Homo sapiens
gcgacctcggccataagcgcctgcgcagtcgcggggccgccggccgtgctgttcccgccaattcctgtggtaatccttaccgtggcgagttccgcgctcaatggagacgtttgaccccaccgagctgcccgagctgcttaaactttattaccggaggctctttccctactctcagtactatcgctggctcaactacggtggagtgataaagaattactttcaacaccgtgaattttcattcacattgaaagatgatatttacattcgctaccaatccttcaacaaccagagtgatctggaaaaggagatgcagaaaatgaatccatacaagattgatataggcgcagtatattctcacagacccaatcaacacaatacagtgaagctgggagctttccaggctcaggaaaaagaactggtatttgacattgacatgacagactatgacgatgtgaggagatgttgtagttctgcagacatatgtcctaagtgctggaccctcatgacaatggccatacgcatcattgacagagcattgaaggaggactttggatttaagcatcgtctctgggtatattctggaaggagaggtgttcattgttgggtctgtgatgaatcagttagaaactgtcttctgcartacgttcygggatagttgagtatttgagccttgtaaagggtggtcaagacgttaaaaagaaagttcacctaagtgaaaaaattcacccttttatcagaaaatctataaacataataaaaaaatactttgaagaatatgcyttggttaatcaagatattctcgaaaataaagaaagctgggataagattttagcccttgtcctgaaacaattcatgatgaacttcaacaaagcttccaaaagtctcacaattcacttcagcgttgggagcacttgaagaaagtagccagcagatatcagaataacatcaaaaatgacaaatatggaccctggctggagtgggagattatgctccagtactgttttccacggctggatatcaatgtcagcaaaggaatcaatcatctactgaagagcccttttagtgttcatcctaaaacaggtcgcatmtctgtgcctattgatttgcagaaagtggaccagtttgatccatttactgttccgaccataagcttcatctgccgtgaattggatgccatttccactaatgaagaggaaaaagaggagaatgaagctgaatctgatgtcaaacatagaaccagagattataagaagaccagtctagcaccttatgtgaaagtttttgaacattttcttgaaaatctggataaatcccgaaaaggagaacttcttaagaagagtgatttacaaaaagatttctgaagacagagctcctcaaaccattgtggatatcttctgccttcaaccacagatcaaatacttcaagagccatttaataaatatggcagaactatatatgtgtcttaaacctcaaagtaaattttccttgagaaataaaaaaaaaaaaaaaaaaaaaagtcgagactagttctctc

SEQ ID NO: 118 - DNA, 339 bp, Homo sapiens
  misc feature (155): n equals a,t,g, or c
  misc feature (307): n equals a,t,g, or c
  misc feature (333): n equals a,t,g, or c
tagatgaagataatgaaaaagaaaaaagggactctttaggcaatgaagaatctgttgataaaacagcatgtgaatgtgtaaggagtccaagggagtctttggatgacctgtttcaaatatgttctccatgcgccattgcaagtggtcttcggaanacctggctgaattgacaacattatgtttggagttgaatgtattgaattctaagatcaaaagcaccagtggracatgtgggaccacactttgccaacagtaactctcctgaaattctgggcttgccatttccctgaaagaagtacttttttcntccggaacttggaaaagagcgaaggnagagta

SEQ ID NO: 119 - DNA, 665 bp, Homo sapiens
  misc feature (616): n equals a,t,g, or c
  misc feature (656): n equals a,t,g, or c
  misc feature (665): n equals a,t,g, or c
aaagagtgtccctagttgtaacagaaactgtcgatgcaggtttatttggagaaggaattgtggagagtttgattcatgcatgggagcatttacttttacagccaaagaccaaaggtgaaagtgctaattgtgaaaagtatgggaaagttataccagcaagtgctgttatatttgggatggcagtagaatgtgcagagataagaagacatcatagagtgggtattaaggacattgctggtatccatttgccaacaaatgtgaaatttcagagtccggcttattcttctgtagatactgaagaaacaattgaaccttatacaactgaaaagatgagtcgagttcctggmggrtatttggctttgacagagtgctttgaaattatgasagtagatttcaacaaycttcaggaattaaaaagtcttgcaactaaraarcctggtaaaattggtattcctgttattaaagaaggcatattagatgctgttgtggtttggtttgtactccagcttgatgatgaacatagtttatccacaagtcctaatgaggaaacatgttgggaacaagctgtctaccctgtacatgaccttgcagactaccggataaaacgtggggaccngtgatgatggaatgtcttgtccaagattgttacttaagantccagaatn

SEQ ID NO: 120 - DNA, 622 bp, Homo sapiens
  misc feature (544): n equals a,t,g, or c
  misc feature (577): n equals a,t,g, or c
  misc feature (603): n equals a,t,g, or c
  misc feature (614): n equals a,t,g, or c
  misc feature (620): n equals a,t,g, or c
gagggctgcgggaggcgggaggaaaaagtggggccgggcctgagttgggctgacctgtgaaagtctgggaaggtctgcgagagaagcggagtgttttcagctccggaagtggcagttgtaaacttcacctcccgggggctcttccccttctgtacccctttgctgtttgtccccctcctcccgggtcctggagtccgtcgtgttccaacagtttttgctcttattcccgtgggctgctgggcctcctttcacccgtgagacttggarcggccctggggtcttgggtgtcaagcacggatcacgcgagacccctgagacctcaaatcatctaacgtgaagccacagacatcttggcaattttaatcatcaagaaagaaatatgtcattaagaaatagcagggtattttgaaagaagttggaaaacatcatgaatttgaatactttaagtaatactggtgatacccaaaggttgaagattgcctcattggatgtaaaacaaatacttaaaaatgaaacagagttggatattactggataatctcangaagaaactccattgggctaaaaaagaaaagtntgaaataccaccaaccccatggaaancttgcaagctntgaagnca

SEQ ID NO: 121 - DNA, 889 bp, Homo sapiens
  misc feature (817): n equals a,t,g, or c
  misc feature (830): n equals a,t,g, or c
ggctgaagccatccccttggctgatcagccacatctgttgcagccaaatgctagaaaggaggatctttttggccgtccaagtcagggtctttattcttcatctgccagtagtgggaaatgtttaatggaggttacagtggatagaaactgcctagaggttcttccaacaaaaatgtcttatgctgccaatctgaaaaatgtaatgaacatgcaaaaccggcaaaaaaaagaaggggaagaacagcccgtgctgccagaagaaactgagagttcaaaaccagggccatctgctcatgatcttgctgcacaattaaaaagtagcttactagcagaaataggacttactgaaagtgaagggccacctctcacatctttcaggccacagtgtagctttatgggaatggttatttcccatgatatgctgctaggacgttggcgcctttctttagaactgttcggcagggtattcatggaagatgttggagcagaacctggatcaatcctaactgaattgggtggttttgaggtaaaagaatcaaaattccgcagagaaatggaaaaactgagaaaccagcagtcaagagatttgtcactagaggttgatcgggatcgagatcttctcattcagcagactatgaggcagcttaacaatcactttggtcgaagatgtgctactacaccaatggctgtacacagagtaaaagtcacatttaaggatgagccaggararggcagtggtgtagcacgaagtttttatacagccattgcmcaagcatttttatcaaatgaaaaattgccmaatctagagtgtatcccnaaaaaaaaatttnggcccccccaaaaacccaaaaaaaaggggccaacccccaaccaccaaagggttttttaa

SEQ ID NO: 122 - DNA, 132 bp, Homo sapiens
cttgagcccctgagttgtgggggtagggtgaagagcatatcccacaagaggccccacagggagcagagactgctttaatccctgctgacatcacggaaaagcaacagagccttttcaactttgtcactatgt

SEQ ID NO: 123 - DNA, 1900 bp, Homo sapiens
  misc feature (9): n equals a,t,g, or c
  misc feature (1879): n equals a,t,g, or c
gcggacgcntgggaaacagccgattggagacgggagccaaccagggctgcattggaggttgaaatcacaaagattagacacctttttagataggtgttcttcagcaccactgacaacacggttctgacagtatttcatgacaatggatggtgacagttctacaacagatgcttctcaactaggaatctctgcagactatattggaggaagtcattatgttatacagcctcatgatgatactgaggacagcatgaatgatcatgaagacacaaatggttcaaaagaaagtttcagagaacaagatatatatcttccaatagcaaacgtggctaggataatgaaaaatgccatacctcaaacgggaaagattgcaaaagatgccaaagaatgtgttcaagaatgtgtaagtgagttcatcagttttataacatctgaagcaagtgaaaggtgccatcaagagaaacggaaaacaatcaatggagaagatattctctttgctatgtctactttaggctttgacagttatgtggaacctctgaaattataccttcagaaattcagagaggctatgaaaggagaaaagggaattggtggagcagtcacagctacagatggactaagtgaagagcttacagaggaggcatttactaaccagttaccagctggcttaataaccacagacggtcaacaacaaaatgttatggtttacacaacatcatatcaacagatttctggtgttcagcaaattcagttttcatgatctgaagaaatgatggaatggggagtgtagagaaatgagagtctgtatgattctggaacagagacatcagaaggaaagactggtgaaaagatgtatctttgtatattaatagctgtaatgtagcttcctgatgcttgactaattgaggtgttaattctgacttgagaatctttttcatgaatgattttaaagaaaaatttggattttaaaggtattaaaatatttttgttttgtacgagagtttgttgctctgtatgactcctgtatgcattgtatattgcaatttattactgtcagagatttgtagacagtttcttattttcatattgaatcatgttacttttgtaattcaagtaagcggctgggttaattcatgatgtttgcccttttaataaaatataagggtagagttcattttgaatgcaagttgcctttattataaatttgagtttgtcttggttataccttgcatgataacctagctagatttctagcatttgctgtatttattaaaattattatttttttggtaaaacattaatagtttaagcagcatcatttttttaaaaaatgtaattgaataagtgtgaatgcagaagcaaatattgtctgccctgttaaacttggtgcccattaacagtgtttacactgttcatcgtgcctgttaatgtagttttagttaytggagcttttttaagactagatttggttttgagttacatttttaagaatgtgggaatatatttaagtttaatgtagtcctagtgctcttgaaatggtgcccctttcatttggtacatgattttttttcaaatcatatcttcaagtactatagtattctcttacagaagaggagttttatagtctgatggtaaatgtcttcattttacctttttaattgaaatgtcaagtttcctgttacactatggaaaccaagaaacatcagacatcattgcgtgtacagaccttttgcatgggtgagtggatgaaatggagaacagagtgagtgctgtgaacggtgtgaaatagaagccaacttctagtatgctgtcttcatctctgcaataaactaaacgtaaataawrwaaaaaaaaaaaaaaaaaaaaaaaaaaaaaaaanaaaaaaaaaaaaaaaaaaaaa

SEQ ID NO: 124 - DNA, 1250 bp, Homo sapiens
  misc feature (874): n equals a,t,g, or c
  misc feature (1169): n equals a,t,g, or c
ggcacgaggaggaaactaacgattccctgcccacccccacacccagcaccaccaacaggtgggcaagcttgccgagaaaacgcagagggcatcctgtgagcagcaaacacatctgagcctggaaaagacgcagagaagtaaaagatcaaagtctgattggcaccggctcccattccggctccagcctccaatccgacccccatttcggctgcagcctcggacctagctccggccctcggtctatccggttgcatcctccctccctgttccggatcttatcttgcgccagcgcctactccaggatcccgtagccagacctcaagccatggctggtcccttctcccgtctgctgtccgcccgcccgggactcaggctcctggctttggccggagcggggtctctagccgctgggtttctgctccgaccggaacctgtacgagctgccagtgaacgacggaggctgtatcccccgagcgctgagtacccagacctccgaaagcacaacaactgcatggccagtcacctgaccccagcagtctatgcacggctctgcgacaagaccacacccactggttggacgctagatcagtgtatccagactggcgtggacaaccctggccaccccttcatcaagactgtgggcatggtggctggagatgaggagacctatgaggtatttgctgacctgtttgaccctgtgatccaagagcgacacaatggatatgacccccggacaatgaagcacaccacggatctagatgccagtaaaatccgttctggctactttgatgagaggtatgtattgtcctctagagtcagaactggccgaagcatccgaggactcagtctgcctccagcttgcactcgagcagancgacgagaggtggaacgtgttgtggtggatgcactgagtggcctgaagggtgacctggctggacgttactataggctcagtgagatgacagaggctgaacagcagcagcttattgatgaccactttctgtttgataagcctgtgtccccgttgctgactgcagcaggaatggctcgagactggccagatgctcgtggaatttggcacaacaatgagaagagcttcctgatctgggtgaatgaggaggatcatacacgggtgatctccatggagaagggtggtaacatgaagagantgtttgaaagatctgccgaggcctcaaagaggtrgagagactatgtaggggactaggtgggaggacataaggaaaaccaaa

SEQ ID NO: 125 - DNA, 1189 bp, Homo sapiens
  misc feature (1041): n equals a,t,g, or c
  misc feature (1136): n equals a,t,g, or c
  misc feature (1144): n equals a,t,g, or c
ctttttttaaccctttaggtatctgatcgctttgccaattttgcgttactgggcaggctaagagatcttcttttaattcagcctgcttaagacgggaactgataactgtagtgtatcctctgccttttttcttatctattggaggaagctcagatggtgtcacaagaaggatctgaagtggagcttctagtatccccaggagcgcgaagtgaacacggaaggtacctgcaggatccaattgtgtccattgatctctcagagtggctgaggataatagagtttcttcttcaaggtctcaaggtctgaagcatcccacagaatgatcctactgaataactcccataagctgctggccctatacaaatccttggccaggagcatccctgagtccctgaaggtgtatggctctgtgtatcacatcaatcacgggaaccccttcaacatggaggtgctggtggattcctggcctgaatatcagatggttattatccggcctcaaaagcaggagatgactgatgacatggattcatacacaaacgtatatcgtatgttctccaaagagcctcaaaaatcagaagaagttttgaaaaattgtgagatcgtaaactggaaacagagactccaaatccaaggtcttcaagaaagtttaggtgaggggataagagtggctacattttcaaagtcagtgaaagtagagcattcgagagcactcctcttggttacggaagatattctgaagctcaatgcctccagtaaaagcaagcttggaagctgggctgagacaggccacccagatgatgaatttgaaagtgaaactcccaactttaagtatgcccagctggatgtctcttattctgggctggtaaatgacaactggaagcgagggaagaatgagaggagcctgcattacatcaagcgctgcatagaagacctgccagcagcctgtatgctcggcccagaggagatcccggtctcatgggtaaccatgggacccttcttgtgaagtaggaatggcctacagcatggaaaaataccgaagancaggcaacatgggcacgagtgatggtgcgatacatggaaatatctgcgtcagaaggaatatttccatttttacatctctgtgttgggaaggaaantgaaggantccccgcagatttgtggggggcagttttggtttcttttgaggcct

SEQ ID NO: 126 - DNA, 428 bp, Homo sapiens
  misc feature (388): n equals a,t,g, or c
gaggtcctgagagactgtragagccccaactccattagtattatgggcctcaatacttcccgggttgcaattaccctgaagccccaagaccctatggaacagaacgtagctgagctgttgcagttcctgctggtgaaggatcagagcaagtaccctatccgggagtctgaaatgcgggaatatattgttaaagaatatcgcaaccagtttcctgagatactcaggcgagcagcagcccacctggagtgcatttttaggtttgaattgagagaacttgaccctgaggcacacacctacattctgttaaacaaactgggacctgtgccctttgaagggttagaagagagcccaaatgggccaaagatgggcctcctgatgatgattctangccaaatattcctgaatggcaaccaagccaaggaggctga

SEQ ID NO: 127 - DNA, 645 bp, Homo sapiens
  misc feature (255): n equals a,t,g, or c
acgcggtcggccgggagccggggaggagcgtggacgccggcctggcaggtacccccgcgagaacgtgggagccggtgtatttcagctgcatttattactgatctcgggctgcaccagggcacttgtaggaccgcactaaaaacagcggaaagtgaggagccaagcctgggtccggggcggcccgccgtacagctggcctcacggattccactgcctgcgcctgcagatgacttgttctggagagtagagaatgtnctcggatttaaagtacaatccggtttcctttccattcattatagttgcctacactcaacaaacaaaagttgggaaagataaagggattattctagcgcgtcacattgacaaacaccgacgttaacacgctcagtccagcctgactcacttgcctcaggtcagagaggtcaccactgacgacgccgggccctcaagccgatcctaatccagcttggttctctcagcctcagccagaccatccgttcttgcctctgtcccaccacgtgcaggtgtaagyttccgccgcacttcttgtctgaatctgccaaggaaggaaactggcatctttcagcttaaattctttttcacttgatcaggggtaggagtttaggcggtttttttttttaagga

SEQ ID NO: 128 - DNA, 496 bp, Homo sapiens
  misc feature (475): n equals a,t,g, or c
  misc feature (481): n equals a,t,g, or c
  misc feature (490): n equals a,t,g, or c
ctggagtctcaacgacgcgcacacgagaagtaaggagcggaaggtgggaaagggccggaaaacacacgttcctccgaaaccggtttgcaagtccttgtagagagtgatagattcgtgtggcctttcaaatgattgtgaagtggtggaaatggatccaaaataataagtgacttctctaccaaagcatagaagattcttcatatctccttccagtggctcaatttagattttgggaargagcagaacaagtgaaacacagaaaactgaagagaagaaatcctcattttggacctatatttctccttgactatttcttaatatccatcctacccatcgttctaatgttttaactttgctctgaatttataaatagtaaaggccaaagacatagaatatacatttagtagctttataccaagaaatttgccttgaaagctgctgtscgtggaggggaaagtgtagcaaattcctggcnatttgnaattttaanttattg

SEQ ID NO: 129 - DNA, 424 bp, Homo sapiens
  misc feature (313): n equals a,t,g, or c
ctggcggccgcaggagcgcgtgcggcgtggactttgccgggctcgccacacagccccagacccgtttaggaccgggagaccgaacgcagcgwccagccggggagtttcggcggcgttctccgggcaccgcgcgcggaagccagacgcagcggggggacacatctcgcggtggcgttgccagagtgaggagttagcaggcaggacttgacgaggctctttggtttttctagtcctcaaccactgaagaagaagcttgatgcttggctgtcagaagacatgaattacgcacggttcatcacggcagcgagcgcancagaaacccttctcccatccggaccatgactgacatattgagcagaggaccaaaatcgatgatctccttggctggtggcttaccaaatccaaacatgtttccttttaagac

SEQ ID NO: 130 - DNA, 1709 bp, Homo sapiens
  misc feature (881): n equals a,t,g, or c
  misc feature (1028): n equals a,t,g, or c
  misc feature (1061): n equals a,t,g, or c
  misc feature (1168): n equals a,t,g, or c
tggaccgcagcttcctggaagacacaacccccgccagggacgagaagaaggtgggggccaaggctgcccagcaggacagcsacagtsatggggaggccctgggcggcaasccgatggtggcarggttccaggacgatgtggacctcgaagaccagccacgtgggagtcccccgctgcctgcaggccccgtccccagtcaagacatcactctttcgagtgaggaggaagcagaagtggcagctcccacaaaaggccctgccccagctccccagcagtgctcagagccagagaccaagtggtcctccataccagcttcgaagccacggagggggacagctcccacgaggaccgcagcacccccctggccaggcggtgtctctgttcgcacaggtccggagaagcgcagcagcaccaggccccctgctgagatggagccggggaagggtgagcaggcctcctcgtcggagagtgaccccgagggacccattgctgcacaaatgctgtccttcgtcatggatgaccccgactttgagagcgagggatcagacacacagcgcagggcggatgactttcccgtgcgagatgacccctccgatgtgactgacgaggatgagggccctgccgagccgcccccaccccccaagctccctctccccgccttcagactgaagaatgactcggacctcttcgggctggggctggaggaggccggacccaaggagagcagtgaggaaggtaaggagggcaaaaccccctctaaggagaagaagaagaagaagaaaaaaggcaaagaggaagaagaaaaagctgccaagaagaagagcaaacacaagaagagcaaggacaaggaggagggcaaggaggagcggcgacggcggcancagcggcccccgcgcagcagggagaggacggctgccgatgagctggaggctttcctggggggcggggcccgggcggccgccaccctgggggtggcgactacgaggagctctaggccggcgtgggcagtggccgccctggggcggggngcgtgcctgtcactgcctggggaggcatttgcntctgtaccatcgcctttgccgctgccccgtggctgccgtgtgcgcttctgagctggaagaggccgggcattggtggtccccaggctgggccctgcaggtgctgggcnttcagccyagtgtgagcctgctctgcaagaagggaggggacagctggcttcagccaggctcggtggacaccctggccctctcggggcagagccgccagtgtttctcagggatgtgactgaggcccaggagggacctgtgagggtctgtttacagaggctgggcaggggccgcttggctgtggggtgtgcgctgccccggcacctgcttgccctccgcgctcatctggggccgcagcatgcctatggttccgcttccggccgggagccctgaacacgggtgtgcagactcaccctaaagggcggcccaggccccacgctagaaggctggcgagaccgaagcagcatgtgaggcctctcctgggagtgggggttgtgtttcccacagtggcctcagctgcgcccccgctcaggtgagcccgaaggcaggagccgggaggcactcctcccaaacactccactcagaccataaagcactcctgtttcactctgaaaaaaaaaaaaaaaaaaaaaaaaaaaagggcgccgctcgcgatctagaacc

SEQ ID NO: 131 - DNA, 866 bp, Homo sapiens
  misc feature (683): n equals a,t,g, or c
  misc feature (723): n equals a,t,g, or c
  misc feature (740): n equals a,t,g, or c
  misc feature (793): n equals a,t,g, or c
  misc feature (813): n equals a,t,g, or c
  misc feature (841): n equals a,t,g, or c
ctcgctcggattggttcagtgcactctagaaacactgctgtggtggagaaactggaccccaggtctggagcgaattccagcctgcagggctgataagcgaggcattagtgagattgagagagactttaccccgccgtggtggttggagggcgcgcagtagagcagcagcacaggcgcgggtcccgggaggccggctctgctcgcgccgagatgtggaatctccttcacgaaaccgactcggctgtggccaccgcgcgccgcccgcgctggctgtgcgctggggcgctggtgctggcgggtggcttctttctcctcggcttcctcttcgggtggtttataaaatcctccaatgaagctactaacattactccaaagcataatatgaaagcatttttggatgaattgaaagctgagaacatcaagaagttcttatataattttacacagataccacatttagcaggaacagaacaaaactttcagcttgcaaagcaaattcaatcccagtggaaagaatttggcctggattctgttgagctagcacattatgatgtcctgttgtcctacccaaataagactcatcccaactacatctcaataattaatgaagatggaaatgagattttcaacacatcattatttgaaccacctyctycaggatatgaaaatggttcggatattgnaccacctttcagtgctttctctcctcaaggaatgccaganggcgatctagtgtatgntaactagcacgaactgaagacttctttaaattggracgggacatgaaaatcanttgctctggggaaaattgtnattgccaagatatgggaaagttttcaanaggaaataagggttaaaaatgccca

SEQ ID NO: 132 - DNA, 1593 bp, Homo sapiens
gttgtagtgagctgagatcatgccactgcactccaacctgggtgacagagcgagactccatctcaaaaataaataaataaataaataaataaaaccttaatttgatggtggttttatgtctgccatttccatttagattcaaagaatcctaagaataatggtggagcaaagcttatttttctgttttttgaatcttgtaaggcatggtgccaaacccaatgaaatggtgccaaaaagtcctgcagctggaactagagctagagtctaagggttctgatccttagctccaaggccttctcataaatcctttgacactttcaccctccaacacagtcagtcagtctctgtttttctggttgggtttctatataaaactttccattttgagtaatgatctttccctcttgccttttcttctacatattccaataaagaccttttttgtcttcaactcctgtcacttggattccaggacttcttccatccctcatgtttgttccttactttgccagcctcggccatttctgtatccccctgcctgggkttgctgccctttatgctcctamctcaccaggtacaaggaacatgaagatggctatatgcggctgcagctggttcgctamgagagtgtagagctgacacagcaactgctgcggcaaccacaagagggatcgggctgggaacgtcgctgaacgagagcagcctgcarggsattattctagaaacagtgccaggggagccaggacgtaaggaagaggaagaggagggcaagggtagcgaagggacagccctctcagcctctcaggacaaccccagttctgtcatccacgtggtgaatcagaccaatgcccaaggccagcaararattgtytactatgtgctgtctgaagccccagggagccttcccccagcccctgagccaccttcagggggcatcatggaaaagcttcaaggaatagctgaggagccagagatccagatggtttgaaggccgcagagccagaccatttcttccccaggtcctgaagtttgagccaggcaagtggcagtgcccctagtgggcagccgttgccaatggatgcctttaggagtggtgccgagagcagtgtggtccactctggcctgggtttgcatcattctgcagactctaaagacttcccttttctgccagactacattttgtggggagcctgaggactctggattctttgaggggatcctggatgtgtgtgttcttgttaaagaggctgttatcaggcttaacyataaccctcaagatctgcttgacagtgattaaatccttagctcacatccattcccatctttcgggctccttaggcccaaggatggcatgtgactggtccctgcaagggtcctttctttgtcaccagccaaggcattgataaccaagtagccattttcctcttaaggtttcctctacaaccccaaggactttcatgattatcctcagggacaggattggaggcattgagcgtgtttattaacaaattgtttttggtaataaaataaatgcttggaaaaaaaaaaaaaaaaaaaaaaaaaaaaaaaaaaaaaaaaaaaaaaaactcgtag

SEQ ID NO: 133 - DNA, 408 bp, Homo sapiens
  misc feature (381): n equals a,t,g, or c
tccttctgacgtcaatgtgatggcggaatcgctgaaggatatggaagcagatgcgcagaaactgtaccagttaatctggcgtcagttcgttgcctgccagatgaccccagcgaaatatgactccacgacgctgaccgttggtscgggcgatttccgcctgaaagcacgcggtcgtattttgcgttttgayggctggacaaaagtgatgcctgcgttgcgtaaaggcgatgaagatcgcatcttaccagcagttaataaaggcgatgctctgacgctcgttgaacttacaccagcccagcactttaccaagccgccagcccgtttcagtgaagcatcgctggttaaagagctggaaaaacgcggtatcggtcgtccgtctanctatgcgtcgatcatttcgaccattca

SEQ ID NO: 134 - DNA, 2741 bp, Homo sapiens
  misc feature (1673): n equals a,t,g, or c
  misc feature (2736): n equals a,t,g, or c
cggcgttaagacttcgtagggttagcgaaattgaggtttcttggtattgcgcgtttctcttccttgctgacyctccgaatggccatggactcgtcgcttcaggcccgcctgtttcccggtctcgctatcaagatccaacgcagtaatggtttaattcacagtgccaatgtaaggactgtgaacttggagaaatcctgtgtttcagtggaatgggcagaaggaggtgccacaaagggcaaagagattgattttgatgatgtggctgcaataaacccagaactcttacagcttcttcccttacatccgaagacaatctgcccttgcaggaaaatgtaacaatccagaaacaaaaacggagatccgtcaactccaaaattcctgctccaaaagaaagtcttcgaagccgctccactcgcatgtccactgtctcagagcttcgcatcacggctcaggagaatgacatggaggtggagctgcctgcagykgcaaactcccgcaagcrgttttcagttcctcttcggaggaaatcatgtcttgtgaaggaagtggaaaaaatgaaggaacaagcgagaagagaagaaggcccagaaytctgaawtgagaatgaagagagctcaggwgtatgacagtagttttccaaactgggaatttgcccgaatgattaaagaatttcgggctactttggaatgtcatccacttactatgactgatcctatcgaagagcacagaatatgtgtctgtgttaggaaacgcccactgaataagcaagaattggccaagaaagaaattgatgtgatttccattcctagcaagtgtctcctcttggtacatgaacccaagttgaaagtggacttaacaaagtatctggagaaccaagcattctgctttgactttgcatttgatgaaacagcttcgaatgaagttgtctacaggttcacagcaaggccactggtacagacaatctttgaaggtggaaaagcaacttgttttgcatatggccagacaggaagtggcaagacacatactatgggcggagacctctctgggaaagcccagaatgcatccaaagggatctatgccatggcctyccgggacgtcttcctcctgaagaatcaaccctgctaccggaagttgggcctggaagtctatgtgacattcttcgagatctacaatgggaagctgtttgacctgctcaacaagaaggccaagctgcgcgtgctggaggacggcaagcaacaggtgcaagtggtggggctgcaggagcatctggttaactctgctgatgatgtcatcaagatgmtcgacatgggcagcgcctgcagaacctctgggcagacatttgccaactccaattcctcccgctcccacgcgtgcttccaaattattcttcgagctaaagggagaatgcatggcaagttctctttggtagatctggcagggaatgagcgaggcgcrkacacttccagtgctgaccggcagacccgcatggagggcgcagaaatcaacaagagtctcttagccctgaaggagtgcatcagggccctgggacagaacaaggctcacaccccgttccgtgagagcaagctgacacaggtgctgagggactccttcattggggagaactctaggacttgcatgattgccacgatctcaccaggcataagctcctgtgnaatatactttaaacaccctgagatatgcagacagggtcaaggagctgagcccccacagtgggcccagtggagagcagttgattcaaatggaaacagaagagatggaagcctgctctaacggggcgctgattccaggcaatttatccaaggaagaggaggaactgtcttcccagatgtccagctttaacgargccatgactcagatcagggagctggaggagaaggctatggaagagctcaaggagatcatacagcaaggaccagactggcttgagctctctgagatgaccgagcagccagactatgacctggagacctttgtgaacaaagcggaatctgctctggcccagcaagccaagcatttctcagccctgcgagatgtcatcaaggccttgcgcctggccatgcagctggaagagcaggctagcagacaaataagcagcaagaaacggccccagtgacgactgcaaataaaaatctgtttggtttgacacccagcctcttccctggccctccccagagaactttgggtacctggtgggtctaggcagggtctgagctgggacaggttctggtaaatgccaagtatgggggcatctgggcccagggcagctggggagggggtcagagtgacatgggacactccttttctgttcctcagttgtcgccctcacgagaggaaggagctcttagttacccttttgtgttgcccttctttccatcaaggggaatgttctcagcatagagctttctccgcagcatcctgcctgcgtggactggctgctaatggagagctccctggggttgtcctggctctggggagagagacggagcctttagtacagctatctgctggctctaaaccttctacgcctttgggccgagcactgaatgtcttgtactttaaaaaaatgtttctgagacctctttctactttactgtctccctagagatcctagaggatccctactgttttctgttttatgtgtttatacattgtatgtaacaataaagagaaaaaataaaaaaaaaaaaaaaaaaaaaaaaaaaaaagggggggggnccccc

SEQ ID NO: 135 - DNA, 686 bp, Homo sapiens
  misc feature (638): n equals a,t,g, or c
  misc feature (655): n equals a,t,g, or c
tcttccttttttccgcctctcgttcgcttttgtcttacgaggcttccggaacacggcccagaattacagagaaaacacacctgcacgcgcactctctcgtacacgctgtgcggcttctgtttggttggccagttcgtcccaatttccgactcacaggctgcggagcagcaactctcacgatatttgctcgacccgcaggcgtatccgctgccgggttctggcgcgccctttcagttctgcttgctgtcsgcaccgctgcgttacccggaaccgccgggccgaacagcatgacgtccgctttggagaactacatcaaccgtatcctcaagctggcgccgcgggcgtgagccggggtcgcggagaggccgcggtcggggatcggtgggaggttgggaggcctggcctcggcgggatcctgggggcgggcgaggagatgagggccccggaacgacccagagttcgccggcggcgcctcgagccttcccgctgctgcgggcccargggtcctttccattttgcctgcaaaacccaaataaaaacccagtgtgattattccgaacttttctgtcttaaaaaaaatgtacgctcttgattcttacttactatttccctatggcataagtgttaaagtttgtgantaagatgaacagtcgtnctggcggcgacaacagtttgcaatctttgta

SEQ ID NO: 136 - DNA, 242 bp, Homo sapiens
  misc feature (229): n equals a,t,g, or c
  misc feature (242): n equals a,t,g, or c
cagcttactctcaatatatctctcttactctctctctctctctcttttttttttaatatggtgaaattagaccaggggtcagaacatagattttagtctcctttagttcatctactaggagactaaattagataatctctaaactcccttttagttctaaaattctgtaattaaactctagcatatcatcattttagactaaaagttttcttcttcttcttcttttttnttttggttttttn

SEQ ID NO: 137 - DNA, 545 bp, Homo sapiens
  misc feature (445): n equals a,t,g, or c
  misc feature (527): n equals a,t,g, or c
  misc feature (534): n equals a,t,g, or c
caggaagagcccaactgggtatcagaataagccacatgcaccttctgaaactgcccaaatccacacctgcataagaatttgagcccagttcataaagcagatcatgaagcaattatcttcctggaagggtttttagcttgctctccagttgcctcagcagctttggctctgtgccacagtgagcccaaggggaaggtgatggaacagcatcacatctgcaggctcagtgttttgtttggtgagggtaaggggagggaatgtagacggatgaagaaatttctccctactgcttccattttgatatttctttaacttcacatttcatcctcattcctagcagttgcctagttatagaggatttcttttawctttttttcagaggcatgccaggtggaagtgaggtgcttgstggsctacaactccagtgctcgcaattccaaaatgncccttggatggagggttggtgagaatgtcaccacagtgggaaaccagcaatcgggggaaccattcccttaagcaagcctttnaaagttnttttaatgccc

SEQ ID NO: 138 - DNA, 396 bp, Homo sapiens
  misc feature (334): n equals a,t,g, or c
  misc feature (373): n equals a,t,g, or c
tcctcggggagcccagttgtgcccaccattctctgtaaggtggtcccagggtgggcttaggagcctataatagtggccagtgccagaggaggctccctcaagaaagccagagttgagatctggaggaggagagggagttagccagaccagggtggagatgagggtattctgagcagcaggacctgcaggggcacaaggcaagggccgcatcctagaggagacccagtggccaggcacatcatgggaactgcaggctggccccaagcctctgccccgctcctcccttgcaggcagggcctcctggagccttgtgctcatcctgggctcttgaggncccagccctgcacagagagcgcagacgtgccttgccttncaacccgtccgctctgtcctctt

SEQ ID NO: 139 - DNA, 2771 bp, Homo sapiens
cggaggtgaggtttgttaccgcgattctgagaggtgggcttttagtccctccagacctcggctttagtgctgtctccgcttttctttcaccttcacagagatgtcttatggtgaaattgaaggtaaattcttgggacctagagaagaagtaacgagtgagccacgctgtaaaaaattgaagtcaaccacagagtcgtatgtttttcacaatcatagtaatgctgattttcacagaatccaagagaaaactggaaatgattgggtccctgtgaccatcattgatgtcagaggacatagttatttgcaggagaacaaaatcaaaactacagatttgcatagacctttgcatgatgagatgcctggtaatagaccagatgttattgaatccattgattcacaggttttacaggaagcacgtcctccattagtatccgcagacgatgagatatatagcacaagtaaagcatttataggacccatttacaaaccccctgagaaaaagaaacgtaatgaagggaggaatgaggcacatgttctaaatggtataaatgacagaggaggacaaaaagagaaacagaaatttaactctgaaaaatcagagattgacaatgaattattccagttttacaaagaaattgaagagcttgaaaaggaaaaagatggttttgagaacagttgtaaagaatctgaaccttctcaggaacaatttgttccattttatgagggtcataataatggtctcttaaaacctgatgaagaaaagaaagatcttagtaataaagctatgccatcacattgtgattatcagcagaacttggggaatgagccagacaaatatccctgtaatggacaagtaatacctacattttgtgacacttcatttacttctttcaggcctgaatggcagtcagtatatccttttatagtgccctatggtccccctcttcccagtttgaactatcatttaaacattcagagattcagtggtccaccaaatccaccatcaaatattttccaagcccaagatgactctcagatacaaaatggatattatgtaaataattgtcatgttaactggaattgcatgacttttgatcagaacaatgaatatactgactgtagtgagaataggagtagtgttcatccctctggaaatggctgcagtatgcaagatcgatatgtgagtaatggtttctgtgaagtcagagaaagatgctggaaagatcattgtatggacaagcataatggaacagacaggtttgtgaaccagcagtttcaagaggaaaagttaaataaattgcagaagttacttattcttttaagaggtctgcctggttctgggaaaacaacattgkctcgaattctgcttggtcagaatcgtgatggcattgtgttcagcactgatgactattttcaccatcaagatgggtacaggtataatgttaatcaacttggtgatgcccatgactggaaccagaacagagcaaaacaagctatcgatcagggaagatctccagttataatagataacactaatatacaagcttgggaaatgaagccatatgtggaagtggccataggaaaaggatacagagtagagtttcatgaacctgaaacttggtggaaatttgatcctgaagaattagaaaagaggaataaacatggtgtgtctcgaaagaagattgctcagatgttggatcgttatgaatatcaaatgtccatttctattgtaatgaattcagtggaaccatcacacaaaagcacacaaagacctcctcctccacaggggagacagaggtggggaggctctcttggctcacataatcgtgtctgtgtcacaaataatcattaaattagctattttcagctaacacatttgttgttgcacttgaaaaagagttagtgagcctgtcttggagtttaagtagtttcaaataaaaaaaggctacagtgcctcacaaaggatgttcccagcaagttgtttaaattcccagcaagttgttaaagtgtaaataaaaatatatgaaattgtattttaaatgtttttatattctcttgttgtaatactcttggctgttatggaagcacctgagtaatagagtggtgggtaggagctaggatgtttttctacaatcgaattttaaactaatttatctattttatagacactattgaacagttttttaatagttcatatctaaatctaacttttcataaaactttacggtttttccttcactaccttaaatatgcaagaaatactgacttggtatagggtaccttagttttctctattcattagacaggtaaaattatatttcagctgattgatctgtgtgacaaaattatttcttagctataatcagcacatcacttagttcaaacaaaattccccagcaaatgttagatagtaggtatatcagtcacctggggagttttcttcataatatgcatattcatcttgtaatgcatacatagttatcatcctccttctcaacccatctccctaaccccacatgcttgccagttcttgaagggataaagtgattstaataatgttttacttctctctgttcaatttaatgtgatataattctagtataaaaatattttggacagttgcttaacatggtcataagaggatttgtactatagaatatcttctagtactaatttttctgtagagcaaattatatttctctcactggatagtttttagatgtgtttcttcatataaaattaaaaactgagatggaattcaaaaaaaaaaa

SEQ ID NO: 140 - DNA, 422 bp, Homo sapiens
  misc feature (329): n equals a,t,g, or c
  misc feature (392): n equals a,t,g, or c
  misc feature (422): n equals a,t,g, or c
actaagggatactgctcaaagttaagatgacaattatcagtgatgtataataagagatgctgaaataagggtgataataaaggtcccgggcttgctcactcatggtcacagtaaaatttttatgcaagtatataccaccttacataaacctcactttagatatcctcaagtgattgcacatcaagatcttgcaaattgaaaaatacattaagtatgccatggggttgactttttatcagaattcacacatgatttctttcataagttcaggatcttttagggtgcccatagccttgcctatatttacgtattttataaacctacatttnggkatawgaagtcttttcytttttttttgagacgagtatcgctctgtcgcccaggctggagtncagtggcaggatcttggcccactgcaagcn

SEQ ID NO: 141 - DNA, 1630 bp, Homo sapiens
  misc feature (1566): n equals a,t,g, or c
tggcggctctggcggcctaaagaaggcgrccgcggctcagcgtgggctctaacgcggggctgggggccggagacagacttcgcccaggtgacgggtagtaggggcggcgcgcttggcctcgtggggtgtaagacccacttgctgttgcccccggaccttgccgccacaccagccctgtcctggggcggaaccgaagaaggtcgggccctgctgccccgccccgtccttcctccttcccgggcggtcactgtgcgtggctcacttttagagtttacttcaaccacgtggagcttccatggcggcctctcaggtcctgggggagaagattaacatcctgtcgggagagactgtcaaagctggggacagggacccgctggggaacgactgtcccgagcaagataggctcccccagcgctcctggaggcagaagtgtgcctcctacgtgttggccctgaggcctggagcttcagtgcctcactcacaccggtggccctgggcagtgcccttgcctacagatcccacggtgtcctggatcccaggctcttggtgggttgtgccgtggctgtcctggctgtgcacggggccggtaatttggtcaacacttactatgacttttccaagggcattgaccacaaaaagagtgatgacaggacacttgtggaccgaatcttggagccgcaggatgtcgtccggttcggagtcttcctctacacgttgggctgcgtctgtgccgcttgcctctactacctgtcccctctgaaactggagcacttggctcttatctactttggaggcctgtctggctcctttctctacacaggaggaattggattcaagtacgtggctctgggagacctcatcatcctcatcacttttggcccgctggctgtgatgttcgcctacgccatccaggtggggtccctggccatcttcccactggtctatgccatccccctcgccctcagcaccgaggccattctccattccaacaacaccagggacatggagtccgaccgggaggctggtatcgtcacgctggccatcctcatcggccccacgttctcctacattctctacaacacactgctcttcctgccctacctggtcttcagcatcctggccacacactgcaccatcagcctggcactccccctgcttaccattcccatggccttctcccttgagagacagtttcgaagccaggccttcaacaaactgccccagaggactgccaagctcaacctcctgctgggacttttctatgtctttggcatcattctggcaccagcaggcagtctgcccaaaatttaaggggacaagtagctccccccacgacatgtctccctttcttagaatatattaaagtcagagtctctgaggaaggaatgtgatttggcagtcagggtactaagcatgggtgggaactcctgccttataaaaattgtttttgtgttcttaaagataatatgttgtttttctgttttttgttttttccattttatgggggaatttaaaaaccattcttgtatcagaaggtgaattaggcgcatggtctttgttttattnaataaatttccactagagggtgttctcaggtcactttgcagtggaagtgggacttagttcctcc

SEQ ID NO: 142 - DNA, 264 bp, Homo sapiens
accaggatgtctctgaaatggacgtcakctttctgctgatacagctcagttgttactttagctctggaagctgtggaaaggtgctagtgtggcccacagaatacagccattggataaatatgaagacaatcctggaagagcttgttcagaggggtcatgaggtgactgtggtwracatcytcggcttctactcytgtcaatgccagtaaatcatctgctattaaattagaagtttatcctacatctttgaactaaaaattattt

SEQ ID NO: 143 - DNA, 636 bp, Homo sapiens
  misc feature (2): n equals a,t,g, or c
  misc feature (9): n equals a,t,g, or c
  misc feature (260): n equals a,t,g, or c
  misc feature (323): n equals a,t,g, or c
  misc feature (480): n equals a,t,g, or c
antccaccnggtggaggccgctctagaactagtggatcccccgggctgcaggtgcgggcaattcgtctggcgctggaaggggttgatgtcaaactggaacaggccgcaagaacactgggggccgggcgctggcgcgttttctttactatcacgttaccgctgaccttaccgggaattattgttggtacggtactggcttttgctcgttctctcggtgagtttggtgcacatcacctttgtgtcgaacattcctggtgaangcggaaccattccttctgccatgtataccctgatccagacccccggcgggaaaagtggagcgncgagactgtgccattatttctattgcgctggcgatgatctccctgttgatttcagaatggctggccagaatcagccgtgaacgggcggggcgctaatcatgctggaactgaatttttcccagacgttgggcaaccattgcctgactattaatgaaantaccgtacttcaatccataaagttgcgttaagccgcacggttcaaaacggctgggcaccagaatgacgtccgcgccgcccataatgcgatgcgaawatgctcgtgatagccaatctgaacgcccacctgaccggggtatttccgtgccgccgcaag

SEQ ID NO: 144 - DNA, 500 bp, Homo sapiens
  misc feature (476): n equals a,t,g, or c
  misc feature (489): n equals a,t,g, or c
ccgccctcggcgtcctctgtagcgggcgacctaggccgcgggacccggacggaggtagaggccagggcagcgcgtccgggagcggagtccgcgcccgccgccgccatgccggacagctgggacaaggatgtgtaccctgagcccccgcgccgcacgccggtgcagcccaatcccatcgtctacatgatgaaagcgttcgacctcatcgtggaccgacccgtgaccctcgtgagagaatttatagagcggcagcacgcaaagaacaggtattactactaccaccggcagtaccgccgcgtgccagacatcactgagtgcaaggaggaggacatcatgtgcatcaaaktcgaccaagaaattatcacattatgcaggatcggytcaaagcytktcagcagagggaaggacagactaccagcagactgtatcaaggaaktggagcagttacccaggtggccaaggctaccagggaccgntatcaggacctgngggcctacatg

SEQ ID NO: 145 - DNA, 1945 bp, Homo sapiens
  misc feature (1934): n equals a,t,g, or c
ggcacgaggctgctgctttcctctctgttaaagagaatgttcaaggccgaggacacataaaaaagagcagcattgctggctctgttatttagctgtgtgttcttgaaaaagtcacttctccagacatatctcagcatttataacctaagactgaatcactgcattttacccttaatgaggtacgcttacactaatctttttgaaacagtacttaaattgtagcaggacaagccgcagacaaaacccctcagccagcgagtttaagaaagaagggctttattcggccgggatcttcggcaagactcacgtctccaacaaccaagctccccaagtttccggttctgtcacctccaggctgagccgggctggcggaagaggcacgtgcgctgctgaatggagctggtcgctggttgctacgagcaggtcctctttgggttcgctgtacacccggagcccgaggcttgcggcgaccacgagcaatggactcttgtggctgacttcactcaccatgctcacactgcctccttgtcagcagtagctgtaaatagtcgttttgtggtcactgggagcaaagatgaaacaattcacatttatgacatgaaaaagaagattgagcatggggctctagtgcatcacagtggtacaataacttgcctgaaattctatggcaacaggcatttaatcagtggagcggaagatggactcatctgtatctgggatgcaaagaaatgggaatgcctgaartcaattaaagctcacaaaggacaggtgaccttcctttctattcacccatctggcaagttggccctgtcggttggtacagataaaactttaagaacgtggaatcttgtagaaggaagatcagcattcataaaaaatataaaacaaaatgctcacatagtagaatggtccccaagaggagagcagtatgtagttatcatacagaataaaatagacatctatcagcttgacactgcatccattagtggcaccatcacaaatgaaaagagaatttcctctgttaaatttctttcagagtctgtccttgcagtggctggagatgaagaagttataaggttttttgactgtgattcactagtgtgcctctgcgaatttaaagctcatgaaaacagggtaaaggacatgttcagttttgaaattccagagcatcatgttattgtttcagcatcgagtgatggtttcatcaaaatgtggaagcttaagcaggataagaaagttcccccatctttactctgtgaaataaacactaatgccaggctgacgtgtcttggagtgtggctagacaaagtggcagacatgaaagaaagccttcctccagctgcagagccttctcctgtaagtaaagaacagtccaaaattggcaaaaaggagcctggtgacacagtgcacaaagaagaaaagcggtcaaaacctaacacaaagaaacgcggtttaacaggtgacagtaagaaagcaacaaaagaaagtggcctgatatcaaccaagaagaggaaaatggtagaaatgttggaaaagaagaggaaaaagargaaaataaaaacaatgcagtgaatcacagatgtctcctgaaagaactcttttagatgaaatcattctactcaaatgtaccttaattttttttttttccctgagtaaaagcaagaaatttcttcctttggaaaaaatatatatattaaaaaaccacttttagatggttttttttaaaaaaaaaaaaaaactggtaaaattacttttggcagacagtgttttatgaattatgtatcatgttgatatataatatgttaatgtgtcatgtaatttttactttgtacaaagcaaataaagatctttctcaaaatatactgtaaaataatataaaatattgaacacattctttatcaaaaaaaaaaaaaaaaaaaattactgcggtccgncaagggaattc

SEQ ID NO: 146 - DNA, 1114 bp, Homo sapiens
  misc feature (1006): n equals a,t,g, or c
  misc feature (1034): n equals a,t,g, or c
  misc feature (1055): n equals a,t,g, or c
  misc feature (1084): n equals a,t,g, or c
  misc feature (1108): n equals a,t,g, or c
agagtgcgctgcgtttcgatgagccgggacgtggcgccrctctagccagcgcctgggctctgtggcgggcgccgcagctccgcgtcccccgcgcctcctcccagcgcagacttcaagggctaccactggacccttcccctgtcttgaaccctgagccggcaccatgcacggacgcctgaaggtgaagacgtcagaagagcaggcggaggccaaaaggctagagcgagagcagaagctgaagctataccagtcagccacccaggccgtattccagaagcgccaggctggtgagctggatgagtccgtgctggaactgacaagccagattctgggagccaaccctgattttgccaccctctggaactgccgacgagaggtgctccagcagctggagactcagaagtctcctgaagagttggctgctctggtgaaggcagaactgggcttcctggagagctgcctgcgggtgaaccccaagtcttatggtacctggcaccaccgatgctggctgctaggcsgcctgcctgagcccaactggacccgagagctggagctctgtgcccgtttcctggaggtggatgagcggaactttcactgctgggactatcggcggtttgtggccacacaggcagccgtgccccctgcagaagarctagccttcactgacagcctcatcacccgaaacttctccaactactcttcctggcattaccgctcctgtctcttgccccagctgcacccccagccggattctggaccacaggggcgcctccctgaggatgtgctgctcaaagagctggagctggtgcagaatgcttcttcactgaccccaatgaccagagtgcctggttttatcaccgttggctcctaggccgagctgacccccaggatgcactgcgctgcctgcatgtgagccgggacsaggcctgtctgactgtctccttctctcggsccctcttartgggctycaggatkgagatcttgctgctcatgggtgatgaatctncccctgattgtggaatggaggaccccanatggcaggaacccgggccaanctgtctggtattccaagatggtggggcanaaattgggctggggcaaggctggntggaaa

SEQ ID NO: 147 - DNA, 546 bp, Homo sapiens
  misc feature (433): n equals a,t,g, or c
  misc feature (486): n equals a,t,g, or c
ctcgggctgagtagtggcgtggccgtgaggtccctgcgcctgcgccctggatggtcctggtgccgctcccgccttcgcagccagcgcgggcttacctagtgttaagtctctcttcttgggtggcccacgcctaagcgacctatgcttcttgttcttctgaaatcttacagttccccttagatgtaggttggctattggtagcttccgattcagataagtttggaacttgacagatgttttcggggggctgctttagagagaggctttggactatgcaaggggaggaaggaggttcagaaaaacggggtcggggggtcggcaggacgactcttraartgtggaaggtggaagctgggaggggagataaagggcaccraagaccagcttgtttgctcctatcaaggtgatcctttccagagcaagagccatatgnatgtctagtcgcacgagtttgtgccaagtcctttgcaaaaaccttcagatgtnggatctcatgtaatcttgaagacatcttagtcgtcctaagggttaattatttaattgatg

SEQ ID NO: 148 - DNA, 1763 bp, Homo sapiens
ccgaccccagccctagcctctggggcattgtctgcccttcgccgtcggccctccgcctagccgcgcacttcccgccctcccaccttcctttcgcccttccaccakacctccctcgacgcccgacagctgctctgggtactgtttccgggtcagggtgacctctggggtgaggaaactgcgactgggagcgggacccaggcgtgcagcattcgccatgctccgctcacgcgtgggagactgggctgtggggtaccggcccggaaagcacgcagcctccaaagccgccttcctcagggaaatttgcgtgaccttactgccctccgtctacaggccttgtacctctccaggccgatttttccacaatttaaatcccagttcacctggtatccagctccagcaacttagagcgtttcacgtcacgccgggcgccaggcgtcggcttgtataacctgaaaacgctcctgtttttctcatctgtgcagtgggttttgattcccaccatggccatcacccagtttcggttatttaaattttgtacctgcctagcaacagtattctcattcctaaagagattaatatgcagatctggcagaggacggaaattaagtggagaccaaataactttgccaactacagttgattattcatcagttcctaagcagacagatgttgaagagtggacttcctgggatgaagatgcacccaccagtgtaaagatcgaaggagggaatgggaatgtggcaacacaacaaaattctttggaacaactggaacctgactattttaaggacatgacaccaactattaggaaaactcagaaaattgttattaagaagagagaaccattgaattttggcatcccagatgggagcacaggtttctctagtagattagcagctacacaagatctgccttttattcatcagtcttctgaattaggtgacttagatacctggcaggaaaataccaatgcatgggaagaagaagaagatgcagcctggcaagcagaagaagttctgagacagcagaaactagcagacagagaaaagagagcagccgaacaacaaaggaagaaaatggaaaaggaagcacaacggctaatgaagaaggaacaaaacaaaattggtgtgaaactttcataacacatgttcaaattttatcatgccagtaggagaaatctcagctccacaacccaagcaacatttgtatggatttaagagtattttaagaagacatactgcttgattttaatacattgatcaggccatccaggacaccacgattctcccaaagtaccttgaactcttagtgattgagactcaaaaaaacaaaaaagacttgagacaatgttttcttcaacatgctccaaatataagacatttgtttgctgtacagaaagtatcacaaatggaatatatcagtacctctcaagctagtgtttctagctaaataaatgggtgtatataattttatggtggaaaagaactgtactgtctgttatgatttccttcaatgtgcataatgataaaataaataattttaatattcttttgtttccatggttacctgacctaaattagataaattgtagggctttagctttcttatttttgtcaaaagttggtgttgacatacattccctctaatttgaactggtattgtttacgtttgatacaacattaaggaatttgatgattttcatttcatgaaaatgacattaaatgcaataattttacttatcataaaaaaaaaaaaaaaaaaaa

SEQ ID NO: 149 - DNA, 371 bp, Homo sapiens
aattcggcacgagcagacttgagagcaataaatgcaaacctaaatgagaaaatggaatccctgacagctgtgtccgtatcaagcatcagtctctcaaacagttgccccagcctgacagtgctagtctctgtttaatggtaaaaggagactttgccataattttcagatgaagatgtttcccaaacactgtttacagaatgagatgtgactctacagatacctcatagaagacaatccaagatcatacttcattaacttgacagagtacgtgtcttaaaggaagcatcaggaattccaatatttgcmtttaaaatactttttwagggccttttatattaggccatgcttggaaaactggattttttttatta

SEQ ID NO: 150 - DNA, 432 bp, Homo sapiens
  misc feature (3): n equals a,t,g, or c
  misc feature (379): n equals a,t,g, or c
  misc feature (408): n equals a,t,g, or c
  misc feature (421): n equals a,t,g, or c
atnttcaggaatcctcacgcaacccggaagaagcgcaagggctggaccgctaaacctgagggcgcccggcctgcgcacgggaacctggactggaaccctacttgcaggtccccaacttgcgtctctyctctctgtctctaccccagccaaggacaaagacttctcctccggaaggcctcccccagctgagggaacgttccaggtcytccctcggccctggctgcgcgcccggtgccggctctgacgtggtttcctctcccctcaggactggtcctgctcgctcctcgtggcctccctcgcgggcgccttcggytcctccttcctctacggctacaacctgtcggtggtgaatgcccccamcccggaaggacaattttgntgggccaataaatggggttttgaaatttnttgttggatttgntgaatgggctt

SEQ ID NO: 151 - DNA, 401 bp, Homo sapiens
  misc feature (234): n equals a,t,g, or c
gaaagcaaagttcaacatcactggtgcctgcttgaatgactcagatgacgactcaccagacttggaccttgatggaaatgagagcscattggccctattgatgtctaacggcagwacgaaaagggtgaagagtttatccaaatctcggcgaaccaagatagcaaagaaggtagacaaggctaggctgatggcagaacaggtgatggaagacgartttgacttggrttcagatgntgagctgcagattgacgagagattggggaaagagaaggcgaccctgataataagaccaaaatttccccggaaattgccccgtgcgaaccttgctctgaccccaaccgagttcgtgaaccaggagaagttgagtttgacattgaggaggatatacaacagatgagggt

SEQ ID NO: 152 - DNA, 851 bp, Homo sapiens
tctccggataactgtgctcctgacatccttccttatggttttgggaactggtctaagatgcatacctatatcagacttaatccttaaaagaagattaattcatggaggacagatgttaaatggattggcaggtccaactgtaatgaatgcagcaccatttctctctacgacgtggttttctgcagatgaaagggccacagccacagctattgcatcaatgctcagttatcttgggggagcatgtgcatttttagttggaccacttgttgttccagctcccaatgggacatcacctcttcttgctgcagagagcagcagggcgcatattaaagatcgcatagaggctgtgttatatgcagaatttggagttgtctgcttaatattttctgcaacactagcttatttcccaccccgacctcctcttcctcccagtgttgctgcagctagccagcgtgagttatcggagaagcgtttgtagattattaagcaattttcgatttttgatgattgctttagcatatgccataccacttggtgtatttgctggctggtctggagttctggacttaattttaacaccagcgcatgtcagccaagtagatgctggctggattggattttggtccatagttggaggctgtgttgttggaatagctatggcaaggtttgcagattttatcaggggtatgctgaaactaattcttctcctcctgttttcgggagctacactgtcatccacgtggttcaccctgamctgtttgaacagcatcacacacctacctttaaccacagtgacattgtatgcctcctgtattctcctgggagtgttcttgaatagcagcgtgcctata

SEQ ID NO: 153 - DNA, 1678 bp, Homo sapiens
  misc feature (1663): n equals a,t,g, or c
ctcgtgccgcacagctctgggtgtgggagggggttgtccagcctccagcagcatggggagggccttggtcagcatctaggtgccaacagggcaagggcggggtcctggagaatgaaggctttatagggctcctcagggaggccccccagccccaaactcaccacctggccgtggacacctgtgtcagcatgtgggacctggttctctccatcgccttgtctgtggggtgcactggtgccgtgcccctcatccagtctcggattgtgggaggctgggagtgtgagaagcattcccaaccctggcaggtggctgtgtacagtcatggatgggcacactgtgggggtgtcctggtgcacccccagtgggtgctcacagctgcccattgcctaaagaagaatagccaggtctggctgggtcggcacaacctgtttgagcctgaagacacaggccagagggtccctgtcagccacagcttcccacacccgctctacaatatgagccttctgaagcatcaaagccttagaccagatgaagactccagccatgacctcatgctgctycgcctgtcagagcctgccaagatcacagatgttgtgaaggtcctgggcctgccacccaggagccagcactggggaccacctgctacgcctcaggctggggcagcatcgaaccagaggagttcttgcgccccaggagtcttcagtgtgtgagcctccatctcctgtccaatgacatgtgtgctagagcttactctgagaaggtgacagagttcatgttgtgtgctgggctctggacaggtggtaaagacacttgtgggggtgattctgggggtccacttgtctgtaatggtgtgcttcaaggtatcacatcatggggccctgagccatgtgccctgcctgaaaagcctgctgtgtacaccaaggtggtgcattaccggaagtggatcaaggacaccatcgcagccaacccctgagtgcccctgtcccacccctacctctagtaaatttaagtccacctcacgttctggcatcacttggcctttctggatgctggacacctgaagcttggaactcacctggccgaagctcgagcctcctgagtcctactgacctgtgctttctggtgtggagtccagggctgctaggaaaaggaatgggcagacacaggtgtatgccaatgtttctgaaatgggtataatttcgtcctctccttcggaacactggctgtctctgaagacttctcgctcagtttcagtgaggacacacacaaagacgtgggtgaccatgttgtttgtggggtgcagagatgggaggggtggggcccaccctggaagagtggacagtgacacaaggtggacactctctacagatcactgaggataagctggagccacaatgcatgaggcacacacacagcaaggatgacgctgtaaacatagcccacgctgtcctgggggcactgggaagcctagataaggccgtgagcagaaagaaggggaggatcctcctatgttgttgaaggagggactagggggagaaactgaaagctgattaattacaggaggtttgttcaggtcccccaaaccaccgtcagatttgatgatttcctagcaggacttacagaaataaagagctatcatgctgtggttaaaaaaaaaaaaaanaaaaagaagtcgacc

SEQ ID NO: 154 - DNA, 1158 bp, Homo sapiens
  misc feature (449): n equals a,t,g, or c
  misc feature (453): n equals a,t,g, or c
  misc feature (1138): n equals a,t,g, or c
  misc feature (1148): n equals a,t,g, or c
ctttatggtgaaagccttacggagatgtctgtgagtagcatatcttctgcaggctcttctgtggcctctgctgtcccctcagcacgaccccgccaccagaagtccatgtccacttctggtcatcctattaaagtcacactgccaaccattaaagacggctctgaagcttaccggcctggtacaacccagagagtgcctgctgcttccccatctgctcacagtattagtactgcgactccagaccggacccgttttccccgagggagctcaagccgaagcactttccatggtgaacagctccgggagcgacgcagcgttgcttataatgggccacctgcttcaccatcccatgaaacgggtgcatttgcaatgccagaaggggaacgtcaactggtataataagcaaaatcacatccaaatttgttcgcagggatccaagtgaaggcgancagntggcagaaccgacacctcaagaagtacatcaggggaaccaaaagaaagagacaaggaagagggtaaagattctaagccgcgttctttgcggttcacatggagtatgaagaccactagttcaatggaccctaatgacatgatgagagaaatccgaaaagtgttagatgcaaataactgtgattatgagcaaaaagagagatttttgcttttctgtgtccatggagacgctagacaggatagcctcgtgcagtgggagatggaagtctgcaagttgccacgactgtcacttaatggggttcgcttcaagcgaatatctgggacatctattgcctttaagaacattgcatcaaaaatagcaaatgagcttaagctgtaaagaagtccaaatttacaggttcagggaagatacatacatatatgaggtacagtttttgaatgtactggtaatgcctaatgtggtctgcctgtgaatctccccatgtagaatttgcccttaatgcaataaggttatacatagttatgaactgtaaaattaaagtcagtatgaactataataaatatctgtagcttaaaaagtaggttcacatgtacaggtaagtatattgtgtatttctgttcattttctgttcatagagttgtataataaaacatgattgcttaaaaaaaaaaaaaaaaaaaaaaattnctgcggccgncaagggaatt

SEQ ID NO: 155 - DNA, 1969 bp, Homo sapiens
  misc feature (479): n equals a,t,g, or c
gccgcacgagcagccagagacagcgcgacccggagccggagccagagccagagccagagggaggacgcagccgcgccggggcgcagaacgaccagctgagcaccgggccccgcgccgcgccggaggaggccgagacgctggcagagaccgagccaggtaagcggcgaggccggggaaggggggcagcccaaggcggacccccagagctcggggtgcagggacgcggggctccgcggcgacaggcagagggaccttcccgcctccgcagccacgcgcgcgcccccggaatgaaccctgagccccagcgtcagggcggcgcaggattctgacaccgcaggattcgcccggttccgtgccttccgttccctggggctcagaagccggcgcgactgcagcgccaccgccttccaccgtcccaggagcggatcccgccccgcgccacccgcgatcggcgccagccccccggtagttatgagaantaataataacttattaacagtgacaaagcaggggttgaccagcaaagcctccgtgtgcttcccaatcccgtgggcagtaaagcggtatattcggggttccctccggtgtccaggagagagagtccacttattttctttcctgtcacttctgatgaggcgaccgaacgcctcgtttagcgaagagggaattaaagcccagaatgagcctgcctctgcgtctccagtggcacaagccctctcttgcccacctggatcctaacaccggatgtcttttggtctggccttcccgggtatcttgttccacggcattttccctgcctccctctcccgcctctcctcagcacacagatccagaatccccatataattctactagacagtagggagaaagttcaaccacgaaacgtctctaactttgggttcttgatgattcttagcaaatgaatgcgtaataaacatatttactcactcttcactccggagagctccttagtcatgtgaaaaaagtgaaatgtatccacgatgacagtgggctgtttgttcactcactaaagagataagggtggattgaattctgttctcttccctgctaacatgtaacttttgtcttcccatccctccttccccactctcctttccagaaaggcacttggggtcttatctgttggactctgaaaacacttcaggcgcccttccaaggcttccccaaacccctaagcagccgcagaagcgctcccgagctgccttctcccacactcaggtgatcgagttggagaggaagttcagccatcagaagtacctgtcggcccctgaacgggcccacctggccaagaacctcaagctcacggagacccaagtgaagatatggttccagaacagacgctataagactaagcgaaagcagctctcctcggagctgggagacttggagaagcactcctctttgccggccctgaaagagaggccttctcccgggcctccctggtctccgtgtataacagctatccttactacccatacctgtactgcgtgggcagtggagcccagcttttkggtaatgccagctcaggtgacaaccattatgatcaaaaactgccttccccagggtgtctctatgaaaagcacaaggggccaaggtcagggagcaagagtgtgcacaccaamgctattggagatttgcgtggaaakctcagattcttcactggtgagacaatgaaacaacagagacagtgaaagttttaatacctaagtcattcctccagtgcatactgtaggtcattttttttggttctggctacctgtttgaaggggagagagggaaaatcaagtggtattttccagcactttgtatgattttggatgagttgtacacccaaggattctgttatgcaactccatcctcctgtgtcactgaatatcaactctgaaagagcaaacctaacaggagaaaggacaaccaggatgaggatgtcaccaactgaattaaactc

SEQ ID NO: 156 - DNA, 400 bp, Homo sapiens
  misc feature (359): n equals a,t,g, or c
  misc feature (366): n equals a,t,g, or c
  misc feature (398): n equals a,t,g, or c
aattcggcacgagaagaaagaaagaatgaaagaaagaaaagaaaagaaagaaaggaaagaaaaaggaaagaaagaaaggaaagaaaggaaagaaagaaagagagagaaagaaagaaggaaaaggaggaagggaattccaggtatataccactgcatgagtaaaggcagggttgtggatagacatagttgatttgtagggcccttgtttgccaagaatagtcctgctttacccctgttgtcctgatgtaattattaataatactgcctcattcagtcttaaataagtcttggrtttggactagaaattatatggctaccyctttatgtgggactaaaagtaattccttgrgacmgggacntggagtnaggtgcccaaggaaagctagaaggtagttttntc

SEQ ID NO: 157 - DNA, 722 bp, Homo sapiens
  misc feature (720): n equals a,t,g, or c
catggtttggtaacctcatgcactgtgggaatgtcagaggaccccgagataatgcttcactgccaagtctgaaaattgtgtccacaagatttgattggtagtattttctatcattgtacaacttaaaatatcttctaatttccattttttttttttgacatgagttgtatagaaatgtgtgcttcagtttctgttatagcaacaactcttgtcacccatagccttacaaaaattcctaattttaatatttaaattttagaattckacragcagaattacaaaaagagtaactaacaagaaagtgagattgtgatgggataacggaatgtcaagtctaattgtcaggaaaagacaaaataacatgggaatgacaatcaaaatggactaaggacttagaagatccgaaactatgaagctactaaaagaaacattggggaatgctccaggacattggtctgggcaaagatttcttgagcaataccttaaaaggacaggcaacccaagcaaaaatggrcagwtgggwtcmcwtcmagctaaaaaacttctacacagcgaaggaaacaaagtgaacagaataacatgggaatgttttctgtaatttagtagtaactggcaatagtttacaaacacattttgtgtatactgctgtcattgcactgattaccttctgttgtagtgactttgttctattagtccactcaattaaaatatttggttttntt

SEQ ID NO: 158 - DNA, 1200 bp, Homo sapiens
  misc feature (274): n equals a,t,g, or c
taatattcctttggattcagagacccacaactaccagattgtcaatcatgaccaaaagttgcttctcatcacttctacaaccccacaatggaaaaagaaccgagtgacagtgtatgagtatgatactagggaagatcagtggattaatataggtaccatgttaggccttttgcagtttgactctggctttatttgcctttgtgctcgtgtttatccttcctgccttgaacctggtcagagttttattactgaggaagatgatgcacggagtagntctagtactgaatgggacttagatggattcagtgagctggactctgagtcaggaagttcaagttctttttcagatgatgaagtctgggtgcaagtagcacctcagcgaaatgcacaggatcagcagggttctttgtaaatagtattttgagacactaagatgtttctactgctacggratgtattttaaacacatatcgtttctttttcttggaaaaaaagttgattaggaccacagatttggtttagaaagggtaatattttgaaatactacaaggtttagacagtccatgaatcgacctgtttaataatttaccatcctgaaagtccagaattaaaatatggaagcaagaactatataattgattaggatgcttggtaggtttttttcattgttcaaatattcattgcacagtggattgttttgattagttagtatgctttttttttaattaattcagtcttctgttaatttttaagttttggttagtgccacaaggaatttaactttttgatttgtataatagaaaactgaactaggaattgttagcggggttttgaaggatgtgtactttccttcaaaataaagtggtagattttcaaaattttacactagtcagttctttatattctaagttaaatgtagtttgtaaaattattttggttttcttctacaaaggaaaaaattggatttatatatataaggttactgcataatgatttcattttgataatgtgcagaatggcctcataagctcacagaaagtaaaaaaaaaaaaaaaaaaaaaagaaaaaatcaggattccactgttttaaaagaaatctcagtttttattttggaatataaaatgtgtatttggtatatgtgaccaattttctatcccaaaaaacacccattcttagtaatgtcatgaattaaacaccctt

SEQ ID NO: 159 - DNA, 345 bp, Homo sapiens
  misc feature (316): n equals a,t,g, or c
  misc feature (321): n equals a,t,g, or c
ttcggcacgagagaaaagtaaaaaaaagaaagaaagaaagaaacaaacaaacaaaacaactggcatacatatatctcctaaatacaggaagaagtattcataatctcactctttagcatggtacaaagctaaccacaactaawttattgtatataargccacgtgaagtgstgtgtgacagccttattttgtgaatagggctgagaaaaccagttcaaattctcctgagactatttcagaggrgttaaaatttgaactcgtttaaaaatcatgrtttatttacttaatattaagtttaggttaacgggcagaaaangaggngcctgggggcatcacccaaatttt

SEQ ID NO: 160 - DNA, 476 bp, Homo sapiens
  misc feature (312): n equals a,t,g, or c
  misc feature (377): n equals a,t,g, or c
  misc feature (421): n equals a,t,g, or c
aattcggcacgagagacaccagagtgaaggagagaggccatgctgtgtccgagaagctcctactggggtggaagggacagctccacaaaggctgctcttgcaggggctctcctgcagcaaggtgcctgctgactgtccccagactgtctcccgacacagagggatgcaaaggcagcctcttcctgctcagtggaatagggaaattatatcacctttcacttcccactctcacttctgcccctgctacccttagtctttggcttttgctgacattttcccctcttatcttttctcctgaccaagttctaggtntttcatagggcagtcttaggtgagggttggaaccccaatgaagttgggcaacagaaacccagctnacaatggctgttcactgtgggcaagctgtttccccttcatcttntaaaagtggaggtggggttagtgtatgagtctgggtttccattcaactgtgtgtg

SEQ ID NO: 161 - DNA, 520 bp, Homo sapiens
  misc feature (512): n equals a,t,g, or c
  misc feature (520): n equals a,t,g, or c
aattcggcacgagctgcgcgcggctacagcacggttcgtttttcctttagtcaggaaggacgttggtgttgaggttagcatacgtatcaaggacagtaactaccatggctcccgaagttttgccaaaacctcggatgcgtggccttctggccaggcgtctgcgaaatcatatggctgtagcattcgtgctatccctgggggttgcagctttgtataagtttcgtgtggctgatcaaagaaagaaggcatacgcagatttctacagaaactacgatgtcatgaaagattttgaggagatgaggaaggctggtatctttcagagtgtaaagtaatcttggaatataaagaatttcttcaggttgaattacctagaagtttgtcactgacttgtgttcctgaactatgacacatgaatatgtgggctaagaaatagttcctcttgataaataaacaattaacaaataaaaaaaaaaaaaaaggggggggcccctctaaaaggtccaagcttacgnacgggtgn

SEQ ID NO: 162 - DNA, 339 bp, Homo sapiens
  misc feature (109): n equals a,t,g, or c
  misc feature (334): n equals a,t,g, or c
aattcggcacgagcgcgcctccacgcccagctaatttttgtatttttggtagagacggggtttcttcacgttggctaggctgatcttgaactcctgacctcaagtggtntgcctgcctcatcctcccaaagtgctgggattacaggcgtgacacctgcacccacccatgctctagtacatcctaaagaatgcctttagttcctctttcctgacattactctgcttaaattccccagattcaagctttttgagaatcctatctcagcattttgggcatcaggccatgttatatataggtrcacaacttctaggccttgtttagttggacaggttnaaaag

SEQ ID NO: 163 - DNA, 357 bp, Homo sapiens
  misc feature (343): n equals a,t,g, or c
  misc feature (349): n equals a,t,g, or c
aattcggcagagcagaacattggtatgcggcacatgactgtagatcttctcattaataataggcaacctggtcaggtgcacgartctagggttcagaatccaacaggctcaaattcaagtccagctcagccacgtggctgatgctgtctgaacctcagcgtcctcagctgttaaacagaggtaaccatccccatctcagcagctttgggaggaaattaaatgagatatattggggatccagataaccaataaaatatcaaatcactttaccagttcaagctcttaccacttcagtgattgcatgggctttatcactgacggatggaactcaggggttccaggngttcgngacccagc

SEQ ID NO: 164 - DNA, 1079 bp, Homo sapiens
  misc feature (303): n equals a,t,g, or c
  misc feature (831): n equals a,t,g, or c
  misc feature (993): n equals a,t,g, or c
  misc feature (1058): n equals a,t,g, or c
ggcacgagcttggcctccagagtgctgggattacaggtgtgagctaccgcgcccggcctattatcttgtactttctaactgagccctctattttctttattttaataatatttctccccacttgagaatcacttgttagttcttggtaggaattcagttgggcaatgataacttttatgggcaaaaacattctattatagtgaacaaatgaarataacagcgtattttcaatattttcttattccttaaattccactcttttaacactatgcttaaccacttaatgtgatgaaatattcctanaagttaaatgactattaaagcatatattgttgcatgtatatattaagtagccgatactctaaatararataccactgttacagataaatggggcctttaaaaatatgaaaaacaaacttgtgaaaatgtataaaagatgcatctgttgtttcaaatggcactrtcttyttttcagtactacaaaaacagaataattttgaagttttagaataaatgtaatatatttactataattctaaatgtttaaatgcttttctaaaaatgcaaaactatgatgtytagttgctttattttacctctatgtgattatttttcttaattgttattttttataatcattatttttctgaaccattcttctggcctcagaagtaggactgaattctactattgctaggtgtgagaaagtggtggtgagaaccttagagcagtggagatttgctacctggtctgtgttttgagaagtgccccttagaaagttaaaagaatgtagaaaagatactcagtcttaatcctatgcaaaaaaanaaaatcaagtaattgttttcctatgrggaaaataaccatgagctgtatcatgctacttagcttttatgtaaatatttcttatgkctcctctattaagrgtatttactaaaactctgtaatctccaaaatattgctatcaaattacacaccatgttttctatnattctcatagatctgccttataaacatttaaataaaaagtactatttaatgatttaaaaaaaaanaaaaaaaagaaaaaaaaaaaa

SEQ ID NO: 165 - DNA, 1325 bp, Homo sapiens
  misc feature (1302): n equals a,t,g, or c
  misc feature (1313): n equals a,t,g, or c
ttaaaacaagatacatacatagtataacacacctcacagtgttaagatttatattgtgaaatgagacaccctaccttcaattgttcatcagtgggtaaaacaaattctgatgtacattcaggacaaatgattagccctaaatgaaactgtaataatttcagtggaaactcaatctgtttttacctttaaacagtgaattttacatgaatgaatgggttcttcactttttttttagtatgagaaaattatacagtgcttaattttcagagattctttccatatgttactaaaaaatgttttgttcagcctaacatactgagttttttttaactttctaaattattgaatttccatcatgcattcatccaaaattaaggcagactgtttggattcttccagtggccagatgagctaaattaaatcacaaaagcagatgcttttgtatgatctccaaattgccaactttaaggaaatattctcttgaaattgtctttaaagatcttttgcagctttgcagatacccagactgagctggaactggaatttgtcttcctattgactctacttctttaaaagcggctgcccattacattcctcagctgtccttgcagttaggtgtacatgtgactgagtgttggccagtgagatgaagtctcctcaaaggaaggcagcatgtgtcctttttcatcccttcatcttgctgctgggattgtggatataacaggagccctggcagctgtctccagaggatcaaagccacacccaaagagtaaggcagattagagaccagaaagaccttgactacttccctacttccactgctttttcctgcattkaagccattgtaaatctgggtgtgttacatgaagtgaaaattaattctttctgcccttcagttctttatcctgataccatttaacactgtctgaattaactagactgcaataattctttcttttgaaagcttttaaaggataatgtgcaattcacattaaaattgattttccattgtcaattagttatactcattttcctgccttgatctttcattagatattttgtatctgcttggaatatattatcttctttttaactgtgtaattggtaattactaaaactctgtaatctccaaaatattgctatcaaattacacaccatgttttctatcattctcatagatctgccttataaacatttaaataaaaagtactatttaatgattaaaaaaaaaaaaaaaaaaaaaaaaaaaaaaaaaaaaaaaaaaaaaagggaaaaaaaaaaaaaaaaaaaaaaaaaaaaaanggggggggggnccaaaaaaaaaa

SEQ ID NO: 166 - DNA, 394 bp, Homo sapiens
  misc feature (316): n equals a,t,g, or c
  misc feature (341): n equals a,t,g, or c
  misc feature (376): n equals a,t,g, or c
  misc feature (392): n equals a,t,g, or c
aattcggcacgagtttgcatccaaattgtttgacctttgtgcagtggctcccattatcaactggggaaccagtacaatctttacctagttactactgaggttgttctctctccatcacaaaatttcatgctatttatctgtgagaaaatgcctgaggactttcacacagtaattcatcttatctggaacccttaggatcagatgtagaccgagcaaatgtcaagttcacagagaacacctgtgtcttcagaacattaaagggcaccattagagcttgtttcccttcactttacatgcacatttttggsataagttnggggctkratgatgttgtcatagsnaatactgctagratgrttgctgtactcattcactnccaaaaaagggggggntg

SEQ ID NO: 167 - DNA, 517 bp, Homo sapiens
  misc feature (122): n equals a,t,g, or c
  misc feature (215): n equals a,t,g, or c
  misc feature (400): n equals a,t,g, or c
  misc feature (401): n equals a,t,g, or c
  misc feature (472): n equals a,t,g, or c
ataattgcggctctttctcctattcagattttacccagtgatggaaaagatcaattttcttgtggaaattcagtggctgaccaagccttccttgattctctctcagccagcacagctcaggncagttcgtcggctgccagcaacaatcaccaggtacgtctcacttcctccttctggatgtggctggctttacggaaaacagagcgtatttgtgnaaggcttgtgatgcattatagctattgccattccccaaaagcaaaaacaaagtcgctttaggttgttctgtggcatttctgttgggtactaacaaagaaatcacctgttwagcctgataatgactgtttgcaaatttattataagagaaaaggcagggtattgagggttgcttttaggaagtctnnccatgatatggaacacagaccccagaaacttgcaaataccctcttaggttaaggcatggaaagaggaggangagagaggtcttgtttgttgaggaggtccatgtcaggccttggcc

SEQ ID NO: 168 - DNA, 341 bp, Homo sapiens
  misc feature (335): n equals a,t,g, or c
cttccctcagcccttggccaacagcattctactttctgtctctacggatttracactttagtagcctcatgtaggaagaatcataatacttgtytttttgtgactggcttatttcacttagcataatattttcaatgttcatccattttgaagctccatgtgagtgggcaggaacttgttaactggaggccttcactgagaagtgattaaggtgatgaatacctgccagtgcagtggcttcacacctgtactccagcactttggggaggccaaggcaggaagatcatttgagccccaggatttsgggaccaccttkggcaatatagtgagacccngtgttt

SEQ ID NO: 169 - DNA, 350 bp, Homo sapiens
  misc feature (293): n equals a,t,g, or c
  misc feature (305): n equals a,t,g, or c
  misc feature (311): n equals a,t,g, or c
  misc feature (314): n equals a,t,g, or c
  misc feature (338): n equals a,t,g, or c
  misc feature (343): n equals a,t,g, or c
ttcggcacgaggtcttgactcctacccccctacaacacatataaaatcagttccagatagatcacacatctaaatgtgaaatgcaaaataataaagctttaagaaaaaaagtaatggaaccatcttcatgatcttagagtaagtagagatttattaagtaggatattaaaggaacactataaatttagggaaaaaatcaatatattgattatattaaaattaaggaacttttcctcattaagaggccacaaagtatttgtagtatacacatccaacaaaagttccatattccngaatwtwtgganggaatnccnatggtacgttaaaaaaaggccagncccanggggggg

SEQ ID NO: 170 - DNA, 441 bp, Homo sapiens
  misc feature (111): n equals a,t,g, or c
  misc feature (143): n equals a,t,g, or c
aattcggcacgagacatggtgaacctggtctctacataaaatacaaaaacttagatgggcatggtggtgtgtgcctatagtcccactacttgtggggctaaggcaggaggntcacttgagccccggaggtcgaggctacagtnagccaagagtgcactactgtactccagccagggcaagagagcgagaccctgtctcaataaataaataaataaataaataaataaataaataaataaataaaaaaaaacaaagttgattaagaaaggaagtataggccaggcacagtggctcacacctgtaatccttgcattttggaaggctgaggcaggaggatcactttaggcctggtgtgttcaagaccagcctggtcaacatagtgagacaytgtytytaccaaaaaaaggaaggaagggacacatatcaaactgaaacaaaatt

SEQ ID NO: 171 - DNA, 403 bp, Homo sapiens
  misc feature (399): n equals a,t,g, or c
  misc feature (401): n equals a,t,g, or c
ttttcatgaacctcttccctgggaaaccttatgactcaacagtcaaaggtgtccgaatagtaaagatggttttcagtgatcaggtctgtgcccatgcctggccttggatagactctgaaatgagattctttgtttgattgatggggtgatggtttctgttgtgtacatttgaaggaaaccagtttccccacccaaaatttctaaggagtttaatctttggggtrtaggggagttaaactacactgagtcaaggaagtaattgattgcatatttcctctaaaagtcagctatggrttgatattgactaaaacaaactagcagttctcttccaccaccaagtcmgagcgtctgttcaccattctgcatggttaaaagracccacttagggatgggtaatgntncc

SEQ ID NO: 172 - DNA, 984 bp, Homo sapiens
  misc feature (48): n equals a,t,g, or c
caagatatttacttccgctccaaacaaagatgggccagctaacgagcncgggggaaacatccgcccggaaggccacttgaaggcacttccgccctctcttaacatggagccggcggaaggggtggtgtagggccgggcgataatggcggcgtcgaggctggagctaaacctggtgcggctgctatmccgctgcgaggcgatggcagcggagaaacgggacccggacgagtggcgcctggagaagtacgtgggagccctagaggacatgttgcaggccctgaaggtccacgcgagcaaaccggcctctgaggtgatcaatgaatattcctggaaggtggattttctgaaggggatgctgcaagccgagaagctgacctcctcctcagagaaagcactggccaaccagttcctggcccctggccgtgtgccaaccacagccagagagcgagtgcccgccacaaagacggtgcatctgcagtcacgggcgcggtacaccagcgagatgcggagtgagctactaggcacggactctgcagagcctgaratggacgtaaggaagagaactggagtggcagggtcccagccagtgagtgagaagcagtcggcagctgagctagacctcgtcctgcagcgacatcagaacctccaggaaaagctggcggaagagatgctaggactggcccggagcctcaagaccaataccctggccgcccagagtgtcatcaagaaggacaaccagaccctgtcacactcactgaaaatggcggaccagaacctggagaaactgaagacggagtcagagcgtctggagcagcacacgcagaagtcagtcaactggctgctctgggccatgctcattatcgtctgcttcatcttcattagcatgatcctcttcattcgaatcatgcctaaactcaaataaagacccccgcccaaaaaaaaaaaaaaaaaaaaaaaaaaaaaaaaaaaaaaaaaaaaaaaaaa

SEQ ID NO: 173 - DNA, 1194 bp, Homo sapiens
  misc feature (3): n equals a,t,g, or c
  misc feature (9): n equals a,t,g, or c
  misc feature (12): n equals a,t,g, or c
  misc feature (13): n equals a,t,g, or c
  misc feature (16): n equals a,t,g, or c
  misc feature (110): n equals a,t,g, or c
  misc feature (1153): n equals a,t,g, or c
  misc feature (1175): n equals a,t,g, or c
  misc feature (1192): n equals a,t,g, or c
cgnggcggnaanntantggcccccccctaaagggaacaaaagctggagctccaccgcggtggcggccgctctagaactagtggatcccccgggctgcaggcaaaaggganaattcaaaatttagaaaaaacattagaaatgttaatatgggatatttttgacttaagacattcagaaaagttaatgttttaacacgatatgtgattatagaattctattcatatatgtgttcacatttatacactttgctatactttgtatttataaatataattctgttagataaataagtgattcatattttgtcaaaactattttaaaatttcaatatttaaaatatttttgaatcactggttttcgttaagtggcatcatagrtgagatttgattccatgtagcatataattttagattgttcctctctcaccccttttaaactccttcaagcattgctattactggggttgcctttgggaaaacttacttctagatactaccatatatctgaaatagtagaggtggatgttaataaaattcataaaataatcatgtattactttttttgatttaccactggaaggaaatacagtcatgtgcaatataatgacgttttggtcattgagacccacatgtgtgacagtggtcccataaggatgttgctgaaaaattcctgttgctgcctagtgacactgtagccatcgtaacgccatagcacgacacgttactcacctgttcatggtgatgctggtgtaaacaaacctgtgctgccagtcatacaaaagtatagcacaatgacaattatgtacagtttatcataattcttgataataaatgactatgttacaggtttatgtattgattccactttttgtcattattttggaatgtactcctactaattataaaaaagaaaaggttaactgtaaaaaagcctcaggcaggtcctttaggaggcattccagaagaagacattgttaccataggagatgacagctctatgtgtgttattgcccctgaagaccttctagtgggacaggatatggaggggaaagacagtgacattggtgatcctgaccctgtgtaggcctaggctaatgtgtgtgtgtcctcgtttttaacaagaaagtttaaaaagtaaaaaaaaaraaaaaggnctcgagaaagggcaaaagggcncttgggcaaatggcagnac

SEQ ID NO: 174 - DNA, 701 bp, Homo sapiens
gcttccactgatcttgcccatctgatgttaccatgtttgttgtaaaggaagagactggcattctggacaactggcatcagagactggctgacatggagaacccactctgtgtgtgctgaggrcagggcactcaccagtgcagaggcagaagtgggtgcctgtcctcgagggttaacccgctttgcctcccgcccacagcccctccaccttctaaaagctcaagagatgatcagactgaaacacccgcccatcttgctgttctgcctaggctggaagacctggcccaggtcatggaggcccctgctccacttgccagattcgcaggagtcttctgaccagagctgtcgcaccttgctgctgccactggcactgctgccattctcatcctcttgggggccttcattggtgccacattctttgtagccacctgggctgtcagccatgagggaaggaccctcgttttagtctcggattgtaaggtttccatctctgtaccttctcacaaagaagagtcagggcccaagcttaatgacctgttttttaattcaggaaggtaaatctcgttctctcgtcacacccggaattacaggtccatttgtcctcagtgggagttgatctttgattcctacaaagaacaataaagtccggtgaattcccataaaaaaaaaaaaaaaaaaactcgggggggggccccggtaacc

SEQ ID NO: 175 - DNA, 1181 bp, Homo sapiens
  misc feature (7): n equals a,t,g, or c
  misc feature (24): n equals a,t,g, or c
  misc feature (79): n equals a,t,g, or c
tgggganatttccccgaaccggcnttcccgggtcgacccacgcgtccgcggacgcgtgggccaaagtgttgtgtgtgtntgtgtgagtgggtgcgtggtatacatgtgtacatatatgtataatatatatctacaatatatattatatatatctatatcatatttctgtggagggttgccatggtaaccagccacagtacatatgtaattctttccatcaccccaacctctcctttctgtgcattcatgcaagagtttcttgtaagccatcagaagttacttttaggatgggggagaggggcgagaaggggaaaaatgggaaatagtctgattttaatgaaatcaaatgtatgtatcatcagttggctacgttttggttctatgctaaactgtgaaaaatcagatgaattgataaaagagttccctgcaaccaattgaaaagtgttctgtgcgtctgttttgtgtctggtgcagaatatgacaatctaccaactgtccctttgtttgaagttggtttagctttggaaagttactgtaaatgccttgcttgtatgatcgtccctggtcacccgactttggaatttgcaccatcatgtttcagtgaagatgctgtaaataggttcagattttactgtctatggatttggggtgttacagtagccttattcacctttttaataaaaatacacatgaaaacaagaaagaaatggcttttcttacccagattgtgtacatagagcaatgttggttttttataaagtctaagcaagatgttttgtataaaatctgaattttgcaatgtatttagctacagcttgtttaacggcagtgtcattcccctttgcactgtaatgaggaaaaaatggtataaaaggttgccaaattgctgcatatttgtgccgtaattatgtaccatgaatatttatttaaaatttcgttgtccaatttgtaagtaacacagtattatgcctgagttataaatatttttttctttctttgttttattttaatagcctgtcataggttttaaatctgctttagtttcacattgcagttagccccagaaaatgaaatccgtgaagtcacattccacatctgtttcaaactgaatttgttcttaaaaaaataaaatatttttttcctatggaaaaaaaaaaaaaaaaaaaaaaaaaaaaaaaaaa

SEQ ID NO: 176 - DNA, 489 bp, Homo sapiens
aatcgctgaaccaggagcggagttgcaggaggagaytcaccactcacttcagcctggtgacagrgggagctctktcttaaaaaaaaaaaaaaaatcatctgtaaaataaattccgggatagtcgttttgttcaaggaaatgttttgtaaattgagctcacactatataatctttattgtcctatcctgatgtataatacagcaggtataattacaccaagcgctatagttataaatatggcatgaagtgaactatggccttttatttccttccagtgtgaacacagcaggtgtgagatgtcatcttggaagacaggccttgcagaaataggcctacatccaaaatattatcttgtgactccatgaaccattcattaaccctttgtatctttgagtgaaaattttactcaaaagttgcatctggaagttcgaagaaattacttgaaataaaaataaagatttctatatagataaaaaaaaaaaaaaaaaa

SEQ ID NO: 177 - DNA, 253 bp, Homo sapiens
aattcggcacgagcccgggwcaggcacacaggcccaggtgtgtaggccacagcagccgcagtcctgaaagsctgcaacacccagacctccaggagagaccaggcccaggatgcctcgcctgttcttgttccacctgctagaattctgtttactactgaaccaattttccagagcagtcgcggccaaatggaaggacgatgtkattaaattatgcggccgcgaattagttcgsgcgcarattgccattttgggg

SEQ ID NO: 178 - DNA, 393 bp, Homo sapiens
  misc feature (214): n equals a,t,g, or c
aattcggcacgagagcttattcattgaaggagtaagtggctgctcactcctttctgctgaaactctttcctgtccttgtagcctagtgtggaatgggagcagggtcacagtgaaagagctgaatctccccacccacccacactgcagcaggctgcggctggccgacttgttaattgccgagcaggaacacagcagcaagctgcgggcacccctnacttgctacagttgatggctgtgtgtctctcccaggacctagagaaaacccgscttgtgtacgagcgcatcactatcggcacattgttcatgtccttcatgaacgrgtaaactgctgtttccgtggrttttcaaaaaaaaaaaaaaaaaaaaaaaaaaaaaaaaagctcgagggtgggc

SEQ ID NO: 179 - DNA, 465 bp, Homo sapiens
  misc feature (377): n equals a,t,g, or c
attataagcgacgatggttctgttgctatgaacacagcagtcggtccctgtcattgtccacccaggagtggccttgttaattccaagtggcatgtatcttccctctgagcttcatttcttcaagatgctctgggtggtgggatgggagaccatcctgcagccctcctcagaccttatcaattcattgagagattgcaaagctgaaagcacctccggccactcctgggagacagaccctttggtgatgaaataaaccagtgacttcagagcctatggtctcaactgtgcttgaaaaacactgtctctgaaaacaactttgtgattctccctgctccctgtggacaaaagcacataattctgctgttacgggtacttgnstcatacgagctttcatgttcagcatgcaatggaatcatgcttgtccatgtgaaataaatatggctctctcgtgtccttaaaaaaaaa

SEQ ID NO: 180 - DNA, 532 bp, Homo sapiens
  misc feature (68): n equals a,t,g, or c
  misc feature (140): n equals a,t,g, or c
  misc feature (496): n equals a,t,g, or c
cttgggttcagggaaaccagagattataccaagacgggtcattctgcgccatggaaaacatccttggnatttaattgctgctgacaataaaggtaagggctgggcttggatacagcattccccagatagagatgctaganaaagtgcatagctatggggtgcacagctctgtttgccttcatcattgtaacccgtagaaagaaaacttgagtaaggtcaaggtttccatgctttccttaaagtgtggagccttttattccatgaaaaggttatacaaaaatccaggttatcaagcaaataaacaagcagttcttactcagataaacaagatacaccccctcaccctacctgctcaatttctctttctccactcccccaaacccacctccattgtagttcctgcagggggtcccgtaagyttattttgaaaatcactagggtgggctkgggcgcggtggsttcaggatgtwaatyccagcactttggggrgggcccngggaaggcagttcattttggggtcaaggggtttttg

SEQ ID NO: 181 - DNA, 814 bp, Homo sapiens
aattcggcagagtaaaattcaaataattataagcatttggcaaaaacaagagaaaagaaacttgccatattttacaagctgcaattttagaaaagctttaacttaatgatagttttatcattgttttcttgtcccaaacttatccagggccatagaagtatgaatctaattaaaacagaaatgggaattattgcacagaaatgggaaataactaattttaaatcagtcaaattggcttcttattaaatacaataattcttatgraaatcatagtaccctattttcagacacagctgccagtttacacatttctcagtatcctgaarggraaaaagtatagccccrcttatactatgtaaaattaccaataaaatatttttatgactacagattttgcatttttgtttacaactatttaaagagttttatgttgtatttagaatttcaacctagaaaccacacagtacttaaattctcctggggtctcctgctttctcttaaccatttgcttaatatatatctacctaaaggagacttctgaattgtaaatgaacttaaaaatagaatgtggatgcaaaatatcacataagacatcatgataacatttgaagaaaaaataaaactgtagaccctaacagttgtgatatttggtggkttcatgtggtaatgtaattttctgkttaattacagtactttttacaggcacagtggkactgtcttttttgtaagatgcyagttgtgaaatacaattaattgcatacagtaaaagtctgtgattaaaacatttatatacctcaaaaaaaaaaaaaaaaaa

SEQ ID NO: 182 - DNA, 317 bp, Homo sapiens
  misc feature (315): n equals a,t,g, or c
taattcggcacgaggaaccactgttccttacaggtaagccagcatgatagttagaccaaaccatcccaatagagacttggcatgcattcaacaaacatcccaggtgcctagggtgtgcccagcaccattccaggagctgccagtaaaggaaacaagactgctgtgtggccaggtgcggtggctcacatctgtaatctcagcactttgggaatgccgaagtgagtggatcacctgaggtcaggagttcaagaccagcctgggccaacatggtgaaaccccattttttacttaaaaaaaaaaaacttgggggggggncc

SEQ ID NO: 183 - DNA, 243 bp, Homo sapiens
  misc feature (169): n equals a,t,g, or c
  misc feature (181): n equals a,t,g, or c
tataaaagaaaaaaaaaggctgtacaaaaatttcttttrtacagagactgtrtaaaagaaaaaaaaaaagaaatacmtgtgttcttaaaaccatttgtatattttcatttctagaccacactgtagctaattattgttattaaatgttaagataatttaagtatataanataagtattganccgggcatggtggctcacccctgtaaatctcagcactttgggaaggctgaaggcggggggtt

SEQ ID NO: 184 - DNA, 1148 bp, Homo sapiens
aattcggcagaggggccatacaaaaattttggacttgttaataccacttactaaccgggcctgtaacactgggctaaacaaagtaagccctgtttactcagcagtgtttgggggacatgaagattgcctagaaatattactccggaatggctacagcccagacgcccaggcgtgccttgtttttggattcagttctcctgwgtgcatggctttccaaaggagtggagctgtragttctttggaattgtgaacattcttttgaaatatggagcccagataaatgaacttcatttggcatactgcctgaagtacgagaagttttcgatatttcgctactttttgaggaaaggttgctcattgggaccatggaaccatatatatgaatttgtaaatcatgcaattaaagcacaagcaaaatataaggagtggttgccacatcttctggttgctggatttgacccactgattctactgtgcaattcttggattgactcagtcagcattgacacccttatcttcactttggagtttactaattggaagacacttgcaccagctgttgaaaggatgctctctgctcgtgcctcaaacgcttggattctacagcaacatattgccactgttccatccctgacccatctttgtcgtttggaaattcggtccagtctaaaatcagaacgtctacggtctgacagttatattagtcagctgccacttcccagaagcctacataattatttgctctatgaagacgttctgaggatgtatgaagttccagaactggcagctattcaagatggataaatcagtgaaactacttaacacagctaatttttttctctgaaaaatcatcgagacaaaagagccacagagtacaagtttttatgattttatagtcaaaagatgattattgattgtsagataggttaggttttggggggccagtagttcagtgagaatgtttatgtttacaactagccttcccagtaaaaaaaaaaaaaaaaaaaattgtaaacatcacttatattactttattgcagcttcatcaccagtacattatatgttgtaatatttatttacctgatcattttgatcattttctgctttattttgctaataaactgtgatgttacttctaaaaaaaaaaa

SEQ ID NO: 185 - DNA, 1971 bp, Homo sapiens
gtactttaacaattcmcartactatagtaytgggaattgttaaaagtacattcctctgaaagataagaatcactggcttctatgcgcttcttttctctcatcatcatgttcttttaccccagtttccttacatttttttaaattgtttcagagtttgttttttttttagtttagattgtgaggcaattattaaatcaaaattaattcatccaatacccctttactagaagttttactagaaaatgtattacattttattttttcttaatccagttctgcaaaaatgacctataaatttattcatgtacaattttggttacttgaattgttaaagaaaacattgtttttgactatgggagtcaactcaacatggcagaaccatttttgagatgatgatacaacaggtagtgaaacagcttaagaattccaaaaaaaaaaaaaaaaaaaaaaaaaaagcaaaactgggtttgggctttgctttaggtatcactggattagaatgagtttaacattagctaaaactgctttgagttgtttggatgattaagagattgccatttttatcttggaagaactagtggtaaaacatccaagagcactaggattgtgatacagaatttgtgaggtttggtggatccacgcccctctcccccactttcccatgatgaaatatcactaataaatcctgtatatttagatattatgctagccatgtaatcagatttatttaattgggtggggcaggtgtgtatttactttagaaaaaatgaaaaagacaagatttatgagaaatatttgaaggcagtacactctggccaactgttaccagttggtatttctacaagttcagaatattttaaacctgatttactagacctgggaattttcaacatggtctaattatttactcaaagacatagatgtgaaaattttaggcaaccttctaaatctttttcaccatggatgaaactataacttaaagaataatacttagaagggttaattggaaatcagagtttgaaataaaacttggaccactttgtatacactcttctcacttgacattttagctatataatatgtactttgagtataacatcaagctttaacaaatatttaaagacaaaaaaatcacgtcagtaaaatactaaaaggctcatttttatatttgttttagatgttttaaatagttgcaatggattaaaaatgatgatttaaaatgttgcttgtaatacagttttgcctgctaaattctccacattttgtaacctgttttatttctttgggtgtaaagcgtttttgcttagtattgtgatattgtatatgttttgtcccagttgtatagtaatgtttcagtccatcatccagctttggctgctgaaatcatacagctgtgaagacttgcctttgtttctgttagactgcttttcagttctgtattgagtatcttaagtactgtagaaaagatgtcacttcttcctttaaggctgttttgtaatatatataaggactggaattgtgtttttaaagaaaagcattcaagtatgacaatatactatctgtgttttcaccattcaaagtgctgtttagtagttgaaacttaaactatttaatgtcatttaataaagtgaccaaaatgtgttgtgctctttattgtattttcacagctttgaaaatctgtgcacatactgtttcatagaaaatgtatagcttttgttgtsctatataatggtggttcttttgcacatttagttatttaatattgagaggtcacgagtttggttattgaatctgttatatactaaattctgtaaagggagatctctcatctcaaaaagaatttacataccaggaagtccatgtgtgtttgtgttagttttggatgtctttgtgtaatccagccccatttcctgtttcccaacagctgtaacactcattttaagtcaagcagggctaccaacccacacttga

SEQ ID NO: 186 - DNA, 366 bp, Homo sapiens
  misc feature (349): n equals a,t,g, or c
  misc feature (353): n equals a,t,g, or c
  misc feature (366): n equals a,t,g, or c
aataacaatgtaattattttyggcakasccttgcctgacttctgaggacctcactaagtctagttctagcctttgtagaatggtcaacttctttcatcaaggctttggtttcattactggtgtctgaattagttccactcctagcttgacccagattttagtttttattatggattttttcttcaaacttgtttatttaatattaagttttcatttttggcagcatatggatgattttatttttaataatcatatctcttagtaaactaatggktaaataatattaaagtataagaggctaaaattgggccaggtgtggtggctcacgcctgtaaatccccgcactttngggnggctgaggcaggn

SEQ ID NO: 187 - DNA, 350 bp, Homo sapiens
  misc feature (341): n equals a,t,g, or c
aattcggcacgagaaagagttgccaaaaataaaaaatattattgtaaggtaaaaaatttcataaatgggcctaatagtgggatggatataactgaaaactaagatggtgatgaggaagacagtcaagaataaatataccaaagtagcaaagaaatacctgtgcaagtagaatagcttgcttcaaacagatgagatttgtcctcccaacatcaaaacatatcacaaaactacagtaattaagtccctttgaggccagcactgactgggrtaagcaaatagrtaaatgggatgtaacaggccttatttcaactaataggttgttcaccactcctagttggttncctgtttcc

SEQ ID NO: 188 - DNA, 375 bp, Homo sapiens
  misc feature (27): n equals a,t,g, or c
aattcggcacgagtgtaaacacctttnatacaaatgccatcatcccatttttactgattagaaaaactttgctattaataggtgcaaagtccatttcaggtataattggtaaggaactgagtgcactcatgggaagaaaccttgttttgttttttgttcgcttttcttcttatccccttttctcagttttatggctggagacatgatttattgcagccatccatcttgggggctcatccatcacacccgggttgctaggagattgtggcagcagctgtttgctctgaatcagacagaaaagttgtcaatcatcaaaggcaggtgaatagcattagaaacacgstattgtcagacggaataattaatcaaagagag

SEQ ID NO: 189 - DNA, 365 bp, Homo sapiens
tcagacaaaaattctgtggacagctgcgaggaattcacttttcctctgaaactcatagccctctcctgaatacatatggtgtgcactaacacttgccattatctgaaactcatagccctatcctgaatgcatatgctgtaggttaccacttgccattggaggtcttggaggccatatcctgtaggagcagggtagccatgggacttaactactattatcccccaaaaatgttgtgtttgtgaattcacctgactgaggaatccctaawtattcatcagatatttcaaaaggrtccatgttccmaagraggrggtttagtattgatttttggttgggtttgttttatttgaggcagtgggggatga

SEQ ID NO: 190 - DNA, 817 bp, Homo sapiens
  misc feature (778): n equals a,t,g, or c
  misc feature (791): n equals a,t,g, or c
  misc feature (801): n equals a,t,g, or c
ggcacgaggttaattttgaaacttatgcttaagatttaaccagggcagaggcatatttcagcataaataatgttgccattataaactcttatccttcctatctcaacaggaaatgagcaattattgcttcatgcttcaatgcactgttttaaaatactgtttaatttgttaaaggtgtgaactgtttaatttatctcacacgtttttttaaacaaatactgattggacatgcgctgcacgccaggctttgggcttggtacctcagggttctcacaggggaggctggaagtggaaacaagcacatgtgtaactgttgtgtagacagtctaattggtagaaaatcagcgaacaaagaagcagacaaattagaaaatgaacgtaaggtgatgtgctaaaaagagggtagccattatgtcagtgtccttcagagaaggtagcactccctgagaccggaatggcagaaagaagtccatcctgcctagcccagcttggacttgtggagaagcaggctgataaaagaaccaaatattgtacattttgaagaagttgcccgctgacttgagagagaggtgttgcgtttcaggtgctgaatgtccttataaaaagttgaatatttcgagcatctctatcaatacatttgaatgctgagagcttttccttccagaagctcatgtcattttcaacacacacttctatttacctttatgtagtttctaaaaattgaaaaccagaattggaggtttttttaaaaaaaaaaaaaaaaaaagccgaggkgggnaaagtamaaatgngcctkwgccntttcctttccccgtcc

SEQ ID NO: 191 - DNA, 590 bp, Homo sapiens
  misc feature (569): n equals a,t,g, or c
  misc feature (573): n equals a,t,g, or c
  misc feature (577): n equals a,t,g, or c
aattagaaagtccaaagtcgacccaaatggatattatgggcagaagtatggtagagcaatccaaacaattgggattatgaatgggaaggttgtaaaccccatattatttgcgtgtacgaaggaagaatcctgtgacaagcacttactccaaaatgagtctacagttataccaagtggatagtagaacttatctactggatttccgtagtattgatgatgaaattacagaagccaaatcagggactgctactccacagagatcgggatcagttagcaactatcgatcttgccaaaggagtgattcagatgctgaggctcaaggaaaatcctcagaagtttctcttacctcatctgtgacctcacttgactcttctcctgttgacctaactccaagacctggaagtcacacaatagaattttttgagatgtgtgcaaatctaattaaaattcttgcacaataaacagaaaactttgcttatttcttttgcagcaataagcatgcataataagtcacagcccaatgcttcccattgtaatccaagttatacctaatttttaaccgggggttngggntttnggattgcaatttg

SEQ ID NO: 192 - DNA, 308 bp, Homo sapiens
  misc feature (285): n equals a,t,g, or c
  misc feature (302): n equals a,t,g, or c
ggcacgagaaataaccagctgacagcatgacgacaggataaaatccacacataccattactaaccttaaatgaaaatgggctaaatgctcccattgaaagacacggggcaagctggataaagaaccaagacccactggagtatgctgtcttcaagaaacccatctcacatgcggtggcatacataggctcaaaataaaggaatggagaaaaatatttcaagcaaatggaaaacagaaaaaagcaggtgttgcactcctactttctgacaaaacagrctwtgcggnttaaaggtkaaaaaagnggaagg

SEQ ID NO: 193 - DNA, 343 bp, Homo sapiens
aattcggcacgaggcctggagaacctatggtgattttcctgggcctgctcattgcccaccattgaaccaatcagcacacatgtcctctcttctgagcccataaaaaccctggactcagccagactcacacagacatcaggactaccagctgcgggaaggagctagccatctcaggtctccttgaatcatccagatgacctgcctgtggaaaggagctacccatcacaggtctacttcctgatgagaactggacattcttgggatgacttgcctgcagaaaggagcgacatattttgggtctyctgagagctgttctgttgctcaatgaagttccttcatgcag

SEQ ID NO: 194 - DNA, 690 bp, Homo sapiens
  misc feature (59): n equals a,t,g, or c
aattcggcacgagaggtgatatacatgatacattctcaagagttgcttgaccgaaagtnacaaggaccccaacccctttgtcctctctacccacagatggccctgggaatcaattcctcaggaattgccctcaagaactctgcttcttgctttgcagagtgccatggtcatgtcattctgaggtcacataacacataaaattagtttctatgagtgtataccatttaaagaatttttttttcagtaaaagggaatattacaatgttggaggagagataagttatagggagctggatttcaaaacgtggtccaagattcaaaaatcctattgatagtggccattttaatcattgccatcgtgtgcttgtttcatccagtgttatgcactttccacagttggacatggtgttagtatagccagacgggtttcattattatttctctttgctttctcaatgttaatttattgcatggtttattctttttctttacagctgaaattgctttaaatgatggttaaaattacaaattaaattgttaatttttatcaatgtgattgtaattaaaaatattttgatttaaataacaaaaataataccagattttaagccgtggaaaatgttcttgatcatttgcagttaaggactttaaataaatcaaatgttaacaaaaaaaaaaaaaaaagtcgac

SEQ ID NO: 195 - DNA, 237 bp, Homo sapiens
  misc feature (222): n equals a,t,g, or c
tggaatctggctagaaagcagtaataaacagaaatctgtatatgtttggaaaaagtaaatctcaatggaaatcagaaaatattttgaactgaaatttggtgatgaaaatactatatatggaaacttgtgggatatattatagctaaagctgtgttagaggaaatttagagccttacataaatacatatattataaaagggaaaatattaaaagttaatgganctaaggcatccatct

SEQ ID NO: 196 - DNA, 267 bp, Homo sapiens
  misc feature (46): n equals a,t,g, or c
  misc feature (261): n equals a,t,g, or c
cccgagagtagacacatcttagtatgtactcagctttgggcaaaanatagatggcgtcacctttcttcgcatgctgagctccatagtagattgaggacttgggttggaagcagtaaggtaattgccaaagccccattatcaggtgggtacacatagagcttttgggaggaacagatgccataagttatcagtttagtcttaccttctctttagagggaaaagaagttggagaaagcgtctgcagctaacaaaaggtactgnccttgg

SEQ ID NO: 197 - DNA, 443 bp, Homo sapiens
  misc feature (406): n equals a,t,g, or c
attgccaatgataaaatttgaactttcaagcaaaaatgcaaattttggaaaatgtgttatttctgccactgagaacataacagcataccaacacttttagactttttacttttatattgtataatgaatgcatcaacatttggatgatctgtattacaggtgaaccaacattttccagtattagtggtggggaatgaccgtgtcwgaaggcttgaccaggatggggatagctcaaggaggcaggatggctcattgcttatgtcttcttcaggaacacaatgaagtaggttgagtttccaggatttggcccctgcattggggatggttggaggaaaggccaaaaacctaggttcttycagsccatgggctttaaaaaacgtggtactttttaaggaacagggttcanggcaggggtgtttttggggctagggttaaggaaaatg

SEQ ID NO: 198 - DNA, 208 bp, Homo sapiens
gaaaatgtgcctttttcagttgtcacagmtggggaatgttactggcatccggtgggtaaaggctagggatgctgctagacattctacggtgcacaggacaacccccacaacaaagaattatctagcccaaaatgtcaacaatgctgaggttgagaagycctaggaaactaaaacagtgtgggggtttgtaatttattggaaaccatgt

SEQ ID NO: 199 - DNA, 258 bp, Homo sapiens
  misc feature (160): n equals a,t,g, or c
attggttttggccatgacactgatttcctggaggcaaggtgctgcttcyattcaggaatgggggtgcatgactgccctgagcagccaaggagccaattctttaggaggctgagtgccatttcagctcaagccttcacggggcagggccaaaagcaacttngaggggtgggtggagcatcttccactgcagcttggccccaagaaataggwtgtagcagcagytcagcttgtgggatggtgcgcaacaatttggggggg

SEQ ID NO: 200 - DNA, 893 bp, Homo sapiens
  misc feature (870): n equals a,t,g, or c
aggggtagtttccacaatctaatccgggtgccatcagagtagagggagtagagaatggatgttgggtaggccatcaataaggtccattctgggcagtatctcaactgccgttcaacaatcgcaagaggaaggtggagcaggtttcttcatcttacagttgagaaaacagagactcagaagggcttcttagttcatgtttcccttagcgcctcagtgattttttcatggtggcttaggccaaaagaaatatctaaccattcaatttataaataattaggtccccaacgaattaaatattatgtcctaccaacttattagctgcttgaaaaatataatacacataaataaaaaaatatatttttcatttctatttcattgktaatcacaactacttactaaggagatgtatgcacctattggacactgtgcaacttctcacctggaatgagattggacactgctgccctcattttctgctccatgttggtgtccatatagtacttgattttttatcagatggcctggaaaacccagtctcacaaaaatatgaaattatcagaaggattatagtgcaatcttatgttgaaagaatgaactacctcactagtagttcacgtgatgtctgacagatgttgagtttcattgtgtttgtgtgttcaaatttttaaatattctgagatactcttgtgaggtcactctaatgccctgggtgccttggccagttttagaaataccagttgaaaatatttgctcaggaatatgcaactaggaaggggcagaatcagaatttaagctttcatattctagccttcagtcttgttcttcaaccatttttaggaactttcccataaggttatgttttccmgcccnrggsatggggggtcattggggcc

SEQ ID NO: 201 - DNA, 503 bp, Homo sapiens
  misc feature (480): n equals a,t,g, or c
  misc feature (493): n equals a,t,g, or c
aaactcactggctgaaggaggaaattttagaaggaagctactaaaagatctaatttgaaaaactacaaaagcattaactaaaaaagtttatttyccttttgtctgggcagtagtgaaaataactactcacaacattcactatgtttgcaaggaattaacacaaataaaagatgcctttttacttaaacaccaagacagaaaacttgcccaatactgagaagcaacttgcattagagagggaactgttaaatgttttcaacccagttcatctggtggatgtttttgcaggttactctgagaattttgcttatgaaaaatcattatttttagtgtagttcacaataatgtattgaacatacttctaatcaaaggtgctatgtccttgtgtatggtactaaatgtgtcctgtgtaccttttgcacaactgagaatcctgcagcttgggtttaatgagtggggtcatggaataattatgggggnatgtaaaaaaaanaaaagagggg

SEQ ID NO: 202 - DNA, 438 bp, Homo sapiens
  misc feature (344): n equals a,t,g, or c
  misc feature (391): n equals a,t,g, or c
  misc feature (412): n equals a,t,g, or c
  misc feature (425): n equals a,t,g, or c
catgtgatcatttatgtgtatacagagtaattataaaatgtttgctgtgtacaaaactattttattagtggattttaaatacattaaatgggtatatatagtatatatgatctaggagtatatatagggaactctaacaaatttataatatttattttttaaaagaatgaccaaacatggcaaaatattactatgagttagatctggacagtggatgcaagggtcttcattatgttattgtctgattttgtgttgaacttatttcacaatgcagaggaaaaaatagtcttggctcatccttagatatcactgttcatagagccagtcaccaggacgatcccacnttttatggtgggccaggcattgggagtccagagcccatcacccaacnaccaagtgacgggtggggacnctggtgagcctgnaaagggggccatc

SEQ ID NO: 203 - DNA, 876 bp, Homo sapiens
  misc feature (778): n equals a,t,g, or c
  misc feature (786): n equals a,t,g, or c
  misc feature (804): n equals a,t,g, or c
  misc feature (817): n equals a,t,g, or c
  misc feature (835): n equals a,t,g, or c
cggcgatatatactaaattcgcgcgtgacttcatgagtagtagtgaatacaatcttcctgcttctaagcttgtgtctactagaatgtcttccccctaaaagatatatttgaatgtttcccatgtttcttctagtactttaatgcgtttcattttcatatygaaatcattgatctacttctagtttykgatacaamatgtgagccaggaaacccagtttttaaatttcaaatagctgtccaggtgtccctgcacctcttatgcatgagccctcgctttgtgccaatgtggagtgcccgcctgctcacacgtgcccatgtggagtgcccgcctgctcatgtgcccatgtggagtgcccgcctgctcacacatgycgatgcggagtgcccrcctgctcacacatgcccatgtggagtgcccgcctgctcacacgtgcccatgtggagtgcccgcctgctcacacacgtgtccatgtggagtgcccacctgctcatgtgcccatgtggagtgcccacctgctcacatgtgccgatgtggagtgccrcctgctcacacacgtgcccatgtggagtgcccgcctgctcacrygtgccgatgcggagtgcccgcctgctcacacgtgccgatgcggagtgcccgcctgctcacacgtgccgatgcggagtgcccgcctgctcacacgtgcccatgcggagtgcccgcctgctcacacgtgccgacgcggagtgcccgcctgctcacacgtgccgacgcggagtgcccgcctgctcacacgtgccnacgcggantgcccgcctgctcacacntgccgacgcggantgcccgcctgctcacacntgcccatgtggagtgccgcctgctcacgttgccgatgtgga

SEQ ID NO: 204 - DNA, 1504 bp, Homo sapiens
  misc feature (4): n equals a,t,g, or c
  misc feature (15): n equals a,t,g, or c
  misc feature (1468): n equals a,t,g, or c
  misc feature (1494): n equals a,t,g, or c
tgtnytccmtgtgcnacaaccygcygcagactggggcccytctcagttaattgggtttcacaagcaataatttctccacaacaaaaaccacaacttgaagtgagttgaaaagagatcaatagtggaaacagtcgcctcagtactttttctttctggatttcatctctagaaatttgaagtgtttgagacagagtccaccctttgtgcaaggcgagaaccaatgaatggactccttgtgtgaattattgcatcttcttccaaagcaggttcatcaagactttcacagagattcatttttgttgagaagtaagggttaataggaggatagaatttggatccaaatctagtgataaaagtgtccaagcaatcaaaaagtaagatattttagggacataccaacatcttccctttctgctaatttcatgctccaaagatatrgcaaaaaaaaaaatcataaaaagtgcttttgccctacttgtgttctagttttcccatggcagaattttgtaattacatccagaatatagtgtatattttgttcctcaaactttattacattggatggatattgttgractggggcactggtgcctatattcaaggctctttcctatcaacgtgtctgtccacgatttgttgtgtttaaagcttcattttgaaaaatcactgtccccctgtgggtagtgactgtattgttttgttcatgtctatgtgggacacattgcatcacatggcaaaccaactctctgtggatgtgagataagtacttataaaaccagcttgaaaacatcgtcttatgtattatgtcatcctgcatcataatgcaattatgtgtatcataacatgctcatttaaaaaaagagaaaccagcaaattcatgtttgtccatagaagaatgtactcagaactttgtgttgtgaaacgatgagaacagaccacctttaagatacccacctgccacttaaaatgacttagttataattagtagtagtctagacgttgttcttggtgtgtgggggtcaattctaacgtcatgttcttttgaataaatctctcagtcatatttgaaaaaaaaatacatgggaataaagaaaaatatcatctttggccaaatcaagcaggcatcttttttcttttccttgacgtttagctcattatacgtggtgattggatcacgagatctgtccgtgtgaaaatacagaaacatcctttagtttacaaaacagttattctaggcttgaagcctctggaacagcaaattgaatagatgggctgcatctgatttgctttatggatgtaattttacaaaacactcttgggtctctgaccccagggagttaagagtgcccagaggaggtcctacacattaaaggataaagccccccagtgatgctggcagcaaatgtgttgagttcttaaatcttccatttggktttctgkttcaggtttttaattgcaatggattttntttcccccgttttttcttaagggccncattttccca

SEQ ID NO: 205 - DNA, 525 bp, Homo sapiens
  misc feature (47): n equals a,t,g, or c
agtcttgttcctaatgcacttgtccacatcgtatgtcattacaagtncttccccttctttaaccagagggcatagaattggggcttagtgtgtcctaaacaagctaaaagattccacctgtagaatcataaaatgagagtctcacacagtttcatgctactttttgtctcttcagcaaggaacggttgctgggattgtcagtgaccaggcatgtctggatagcttcacacatacacataatgcccggttcacctcagcccacacatgttctagaagtagccacttgccaagtgtcagtgttcagtctaaacagcaaatgggttaaccacatgaacagcactggcccatgtgagaatggtgtgaaggcctcctttgtaccattttccatttctctaactcacatgtgtagtctcagcactgcagaggacagatttgtttgtgccctctgagactggttggttggttggttggttagttttgttttatgaatcctaaaatttgtcttggsctgttaaaaaaaaaatt

SEQ ID NO: 206 - DNA, 2494 bp, Homo sapiens
  misc feature (2471): n equals a,t,g, or c
  misc feature (2485): n equals a,t,g, or c
caaagaaacattggaaacaatttctaatgaagaacaaacacctcttcttaaaaagattaacccaaccgaatctacttccaaagcagaagaaaatgaaaaagttgattcaaaagtgaaagctttcaagaaaccattgagtgtatttaaaggccccttactacacatcagcccagcagaagaactgtactttggaagtacagaatccggagagaagaaaaccttaatagtgttgacaaatgtaactaaaaatatagtggcatttaaggtgagaacaacagctccagaaaaatacagagtcaagccaagcaatagcagctgtgacccgggtgcatcagtggatatagttgtgtctccccatgggggtttaacagtctctgcccaagaccgttttctgataatggctgcagaaatggaacagtcatctggcacaggcccagcagaattaactcagttttggaaagaagttcccagaaacaaagtgatggaacataggttaagatgccatactgttgaaagcagtaaaccaaacactcttacgttaaaagacaatgctttcaatatgtcagataaaaccagtgaagatatatgtctacaactcagtcgtttactagaaagcaataggaagcttgaagaccaagttcagcgttgtatctggttccagcagctgctgctttccttaacaatgctcttgcttgcttttgtcacctctttcttctattwattgtacagttaaagaagtggtgccgggtaggaaccacggttccttcgtccattagttggaaaagtaacagacctaaaactctaccaagctactaaaamcattgcacatctgtgcttcctaaaaggaaatatgcagcacgtggaggggaacacatacatgtcttgaaaataaactgctagaataaagaaatgctggagaaattgattataagagactatagctatttagtaaagtaagtaaaggcatatccattgtgtaaattaatagtttaaatataatttattttttccttttgatctgaatacttttaaagcttaagttttatcgtgtaaatacattagctaaactgaaaagtataagtaacatgctttgttgcagccaaaaaatgtaatctgcttttttatgacagaattattatagctgagctgacttactagcttttctatactatgtatatagaagaacatgtatattgagaaagaaaacatacttatatagaggaatttatgtaaccatgactttgtaattttgagaattcctcccagtgatggtcagtattcttttggaatgtaaaccgatttaatgccaaaccaccttaacctttgtttctcagtgttccttaacagcctgccttttattaatctcaggcttttttatgaacactctcatttcagtagaatttggaaaactaagcgtggttggaatttctttgaattctgttagtaatgcccaaaagaaaagtctcaagcagtccccctatccagtcatttttatggagtttcatgttgtccactatagctggacactgaaccttttgcctaatttattataaaggcctgaccctctattgtcccatcttcacccccattccagagcagaggagtctctgtggaccatgaattgcactgtctccctcctcatttctaaatgaaaggtattagatataaatttttttgaaaggttagttgtttgagatgctaagcaggataataaatttagattttaaaatgttccctgtaaaagtcagcccatgacaaggaaatttacaaaatactagagtatctagaagggtgaaaacaaaaaaaaawaaaaaraaacacagacgcccaggtgtcagctctccgtttaaagaatgaaaaatgtaactcatgatgatctgtgaaaccttcaaactaggaccaattgacttacttgatattctgcctttgatatggtagtacccacccggtattcctaaaatcctaaaaagatacaccttgcagtagcagaggcaatgacatgagtttgttttctcattaatatgaccagtttgggtctatgttggttcacatgtacatctactttatatgaaagaaaaaacagttgtctgcctgtaaaatgttgagtttcgattgagccatgtttggagattttattactattctgaagggtagtgttgttggttttcatcttcaagaagttgattccaaaactgagttatgaagaatgatataacagttccttcaaaattggcctaggaaataaaaccttaaaaggacactggtgtgctactttgtcttaatttgggcttttctgtttcagtttgccacctccagctgtgaaatggactgcagtccaccctaagtactgtgcacagtatctccctgtgtgtgtgcacagtggcttccccttacatggtagatttttggccttaatataatctaatcccaaagtagttgtgtatgttttctgttccttggcaataaaatgnaggaataatttagnccaagattg

SEQ ID NO: 207 - DNA, 880 bp, Homo sapiens
  misc feature (864): n equals a,t,g, or c
  misc feature (865): n equals a,t,g, or c
  misc feature (868): n equals a,t,g, or c
  misc feature (878): n equals a,t,g, or c
gggcacgagctttgacccattcaaggatgtctctgcctggagaactagatcctgactcagtggcagcataggttctcccccagggtggtgctgaacttcagctcagaagcagcctggaccccatcttacctccagataaggtgttttaggtactctgttgccagtgttagtgcaacttagtttaaaaatagaggacttgttcacagtatgctctaagtctcacactggagttttgtgcaacataaagtaggtgattttggagcagagcgaagtctagaaatttgccttaaattatttgtggtactctagagaacgtggtatgtgtatgtgtgtatgtgtgtttgaatataggaactagttcattgaacgttagattgttctaagaccagaattagattaaaaatgcataacatattaagtattaaaaagtgtttatattgtatatgaattttttgcggtaagtttagcttggcattttaggttttaattgatgcttaatctgttaaaatgatgtactgtattttaaagtattctaattgtgcttttttgtaccatcttcagtatgaaaaatgtcagtatttagttcctttctcaggcacaattagatttttattgacattgttttcccccttaactcatgtaattagtcatagcaaccaagagtcaagagagtgattaccagccaattaagaaaaatgtgaccaagcagattgcagagtacaataaaaccatcgtggatgctttacatagcatcagcggaaactgagtttaagtccactgaaagtctctaaggaagtatcctcttgctgctaaacttggtacaagttgactaccaaaaaaaaaaaaaaaaagccgaggkgggcnngtnccaagggccntg

SEQ ID NO: 208 - DNA, 640 bp, Homo sapiens
  misc feature (2): n equals a,t,g, or c
  misc feature (5): n equals a,t,g, or c
tnagngaatggacttggctctgtaaaggatggggaacctcacttcgtggtggtccactgcacaggctacatcaaggcctggccccagcaggtgtttccctcccagatgatgacccagcctgaggtcttccaggagatgctgtccatgctgggagatcagagcaacagctacaacaatgaagaattccctgatctaactatgtttccccccttttcagaatagaactattggggtgaggataaggggtgggggagaaaaaatcactgtttgtttttaaaaagcaaatctttctgtaaacagaataaaagttcctctcccttcccttccctcacccctgacatgtaccccctttcccttctggctgttcccctgctctgttgcctctctaaggtaacatttatagaagaaatggaatgaatctccaaggcttttaggactgtctgaaaatttgaggctgggtgaagttaaaacacctttccttatgtctcctgacctgaaattgtatagtgttgatttgtgctgagatcaagaggcaggttagawgaacctgacatccactgyttgccttggatagtatggcttgwttttggaaagaaattctgaagagwgtggaaggagaggagaaatgtcctcatatttg

SEQ ID NO: 209 - DNA, 303 bp, Homo sapiens
  misc feature (85): n equals a,t,g, or c
  misc feature (92): n equals a,t,g, or c
ttgagcactttctatctactagtcactgtgatacagtataagtaaagtgggttgtctcatttaatattcagaataaccacatgangtatganctgccattatctttcccctttgtacaaatgaggaaagtgaggctcacagaagttaattggcccagggtcccacaactagtcagtgcagaggtggggraacataaccagatttgttcggcatgkaacttgtgccaaatttcctccaaagttcttcaaagggcaaggcatgtttattttatcccaatttaggcataccaacaactttaatact

SEQ ID NO: 210 - DNA, 1168 bp, Homo sapiens
ggcacgagcggcasgascttgtctgaacataatgatttcaaaatttgagcttaaaaatgacactctgaaatccagtcagtgtgcctcactagacttttcgatttcaagattttctgcagaaaatgttttgaaaactttgaatacttaaaaatggcaggtgtagtattgcactttgctagttgctcagatacccttttttatttgtatagatattctgagttcctttttttttctacatgttgtacgttgtcgaaagctaaaaggaaacttatccttggatcacggaaggcagaggcatttggtgagatggaaacaaggatgtgtaaaaatgagacgaccacctctcggattaaaaaaaaaaagtgccagagttctagggttctaagtgatgtccaggaaggaggaggaataatatttatggagcatatattatggaacacagcaatcaggatgagtgaaaaattgatttgcagctgacctgcaaatggaatcatcaggaacatccctttctcatggagtcccttaatttacaagttaactgcaaacataggagatgatagttccaagaaggaacattttatcgtctttgtttttaatctcaagaatggtacctaccatcagtgaatgacctgttgcagtgctttcattgaagtgttcttcgttccctcagcaatatgattgtgatgactgaaaaagggaaactgtgccactatttgtaccatcattttcaccaaaatctaaaaatgctttttatgacgtatggagacattcttcatgtttgtttcagtggacactccttgcagatgtaaaaaactgagaaaactcacttttggaaagtgacctaaagagtgtcattgaagtgaattttaagtaggcacgatgattgtwttcatggttgctgttggatcatatctcaggagctggaatgacagacattattgaacaaagaaatcaggatagtggaacttaaagggcttcatctcagtgcyttcataagtatgaagtgcatatatttataattttcastaatcacagggtaaatataaaattgattcattaaaaatgtttcataagaattcaaaggacatagaattttgtgaaatgtagtatttttacttaagtgcctttactctgcttctaccccacagccaattttttataaaccagt

SEQ ID NO: 211 - DNA, 3133 bp, Homo sapiens
  misc feature (3069): n equals a,t,g, or c
  misc feature (3085): n equals a,t,g, or c
  misc feature (3114): n equals a,t,g, or c
cagacctcggacgagagcgccccggggagctcggagcgcgtgcacgcgtggcakacggagaaggccagtgcccagcttgaaggttctgtcaccttttgcagtggtccaaatgagaaaaaagtggaaaatgggaggcatgaaatacatcttttcgttgttgttctttcttttgctagaaggaggcaaaacagagcaagtaaaacattcagagacatattgcatgtttcaagacaagaagtacagagtgggtgagagatggcatccttacctggaaccttatgggttggtttactgcgtgaactgcatctgctcagagaatgggaatgtgctttgcagccgagtcagatgtccaaatgttcattgcctttctcctgtgcatattcctcatctgtgctgccctcgctgcccagaagactccttacccccagtgaacaataaggtgaccagcaagtcttgcgagtacaatgggacaacttaccaacatggagagctgttcgtagctgaagggctctttcagaatcggcaacccaatcaatgcacccagtgcagctgttcggagggaaacgtgtattgtggtctcaagacttgccccaaattaacctgtgccttcccagtctctgttccagattcctgctgccgggtatgcagaggagatggagaactgtcatgggaacattctgatggtgatatcttccggcaacctgccaacagagaagcaagacattcttaccaccgctctcactatgatcctccaccaagccgacaggctggaggtctgtcccgctttcctggggccagaagtcaccggggagctcttatggattcccagcaagcatcaggaaccattgtgcaaattgtcatcaataacaaacacaagcatggacaagtgtgtgtttccaatggaaagacctattctcatggcgagtcctggcacccaaacctccgggcatttggcattgtggagtgtgtgctatgtacttgtaatgtcaccaagcaagagtgtaagaaaatccactgccccaatcgatacccctgcaagtatcctcaaaaaatagacggaaaatgctgcaaggtgtgtccagaagaacttccaggccaaagctttgacaataaaggctacttctgcggggaagaaacgatgcctgtgtatgagtctgtattcatggaggatggggagacaaccagaaaaatagcactggagactgagagaccacctcaggtagaggtccacgtttggactattcgaaagggcattctccagcacttccatattgagaagatctccaagaggatgtttgaggagcttcctcacttcaagctggtgaccagaacaaccctgagccagtggaagatcttcaccgaaggagaagctcagatcagccagatgtgttcaagtcgtgtatgcagaacagagcttgaagatttagtcaaggttttgtacctggagagatctgaaaagggccactgttaggcaagacagacagtattggatagggtaaagcaagaaaactcaagctgcagctggactgcaggcttattttgcttaagtcaacagtgccctaaaactccaaactcaaatgcagtcaattattcacgccatgcacagcataatttgctcctttgtgtggagtggtgtgtcagcccttgaacatctcctccaaagagactagaagagtcttaaattatatgtgggaggaggagggatagaacatcacaacactgctctagtttcttggagaatcacatttctttacaggttaaagacaaacaagaccccagggtttttatctagaaagttattcaagtgaaagaaagagaagggaattgcttagtaggagttctgcagtatagaacaattacttgtatgaaattatacctttgaattttagaatgtcatgtgttcttttaaaaaaattagctccccatcctccctcctcactccctccctccctccttctctctctctctctctctccctctctcacagacacacacacacacacacacacacgcacacgcacgtccacactcacattaaactaaagctttatttgaagcaaagctagccaaaattctacgttacttttcccttgactggatcccaagtagcttggaagtttttgtgcccaggagagtaaataactgtgaacaagaggctctgcccttaggtctttgtggctgtttaagtcaccaacaatagagtcagggtaaagaataaaaacactttcatagcctcattcattcacttagaagtggtaataatttttccctaatgataccacttttcttttccccctgtacctatgggacttccagaaagaagttaaattgagtaaaatcatcagaaactgaatccatgtaagaaaaaataattgttgaagaaagaagttgatagaattcaaaaaggccatctttttgctttcacatcaataaaatttaccaagtaatagatcagtactcactaatatttttgagaccatagttgtctggtcagaaaaattatattaaattagtaaattctagaagctctttaaaagggaagttttccttcttctccaattataggagttgatttttactttgcaaagtggctcggtcctcatgagcatctgcatgttgactcttcagttaagaaaattgttgttcatttagggaggtggatattctgatgaagatctttatcctaaaccttcctactatccttgtcttattcatcaagcagatattttagtcaagaattccagagaaggctgctcctaaaatgtctacttgcagcccaataccagagcataaactatccattctggggtctggctttagaaatcatctttgtgggaagacctaattcttcacagcaaggatctcaggcatgccttctagatttgttccctctgaggggcaggaatgaactgtagaaatgttttaaggacccagaaaccccatatgtctcattccatgactataggtgagagaattctttcctaagagggtttgataccaataggggaaaatgtaaaatgttcagtctttatggacaacctgggcataaaggagtccaattccttatgnaaagagacacaagggnccttatgggccagggttttcttggggacnaaactcttcaccagccacc

SEQ ID NO: 212 - DNA, 680 bp, Homo sapiens
  misc feature (613): n equals a,t,g, or c
  misc feature (660): n equals a,t,g, or c
acccacgcgtccggtaaatagctttacaccaggatggattctgaaatataaattctaaattatatttgttataactatattttatgttgtatgttatcaggagccatcagagaatgacctttttgtgtttggaacacttggttccatgaaaagtatgctttgtgttttaactgttaaaataatttaaaaattaattattttacataattaaagaagttaaaaactattaacattaaataatttcacaatttcaacatgtcaaacctatgaagggagataggaaacaatgagaaacttacttttgctcctttatacagrattattaactatattttactaactaaaaaactctagtattctttacctaaagtcaattggctggtaagagggagagatgcaaaattctccagctctgaacttggagctacttcacactctactcttaatggaaacttgaactaatgatagatagtattttyytcctctatttaaaatttttgtcttgattaggagattttycagtttctccatataaattaattttcttacaatcggattctatggcgtggggcataatttttggctttattttaaaaatttttttttaggaggnggggttcttggctccggtcaccaggggcggggagtggcgtggggccnggatccaggggcttcaccgg

SEQ ID NO: 213 - DNA, 563 bp, Homo sapiens
  misc feature (440): n equals a,t,g, or c
aggattacaggcgttacacgcacacccggctgtaaaaatgtacttattctccagcctcttttgtataaaccatagtaagggatgggagtaatgatgttatctgtgaaaatagccaccatttacccgtaagacaaaacttgttaaagcctcctgagtctaacctagattacatcaggccctttttcacacacaaaaaaatcctttatgggatttaatggaatctgttgtttccccctaagttgaaaaacaactctaaaacactttaaagtaccttcttggcctgggttacatggttcccagcctaggtttcagacttttgcttaaggccmgtaatytyagaaaaaaatttccaaatacatggacagagcggaaaacataaagaagtacttggaccaagaaaaaagaagatggaaaatatcacaagcaaattaaaatagaanaaaatgcaacaggtttcagttatgaatcactttttcgcgaattaccttaatgaaacagttaccgaagttttgggatagaaaaatcctttattttaaaacttactcctccagcttgttataact

SEQ ID NO: 214 - DNA, 2636 bp, Homo sapiens
ccagcaagaagctaactcgaccactggtgatgaaaactggcagacctgcaggaaaagggagcattacgatttcagctgaagaaataaaagataatagagtggtcttgtttgaaatggaagccagaaaactggataataaggatctatttggaaagtcagacccatacctggaattccacaagcagacatctgatggaaactggctaatggttcatcggacagaggttgttaaaaacaacttgaatccygtttggasgcctttcamgatctctcttaactcactgtgttmcggagatatggacaaaaccattaaggtggagtgttatgattatgacaatgatgggtcacatgatctcattggaacatttcagaccaccatgacaaaactgaaagaagcctccagaagctcacctgttgaattkgaatgcataaatgagaaaaaaaggcaaaagaaaaaaagctacaagaattcaggtgttatcagtgtgaaacagtgtgagattacagtagaatgcacattccttgactatataatgggaggatgtcagctgaattttactgtgggagtggacttcactggctccaatggtgacccaaggtctccagactcccttcattacatcagccccaatggcgttaatgagtatttgactgctctctggtctgtgggactggtcattcaagattatgatgctgataagatgtttccagcttttggttttggcgctcagatacctcctcagtggcaggtatcacatgaatttccaatgaacttcaacccatccaatccctactgcaatggaatccaaggcattgtagaggcgtatcggtcttgtcttcctcagataaaactctatggaccaactaatttttctccaatcataaatcacgtggccaggtttgctgctgcagccacgcaacagcagacagcttctcaatatttwgtgcttttgattattactgatggtgtgatcacagaccttgatgaaaccagacaagctatagttaatgcctccagctgcctatgtccatcataattgttggagttggaggtgctgacttcagcgccatggagtttctggatggtgatggtggaagtctccgctccccattgggcgaagtggccatcagagatattgtccagtttgtgcctttcagacagttccagaatgctccaaaagaagcacttgctcagtgtgtcttggcagagattccccagcaggtggtgggctacttcaatacatacaaactccttcctcccaagaacccagccacgaaacaacagaagcagtgaccacttcaacagaattcttttgtgttctgtggagcaatgccatctctcaccccaaatcgtgtatctgtcattctacgtactttttaccctcagcatttatgatgtaaatctctttctctatggattatatctgtttaaagcattctttctaggttattttggggggacagtgccaagtccatctttgcccagtcaattcagtgattgatagcaatttacattaattgcagtaaagctctttggattagaaattagtgtggggaaagcttattctgttgttgtttttgtttactttcatatgatgaaaatgctgtgtttaagtgtttgtcaataggaagaatggaaaactgttgggatgatgtggtttgcaggttgctgtgcctgattcacagtgtatgttgtataagccartgtccatacctgattatgagagcttcttaaattatatgatatcaaatttgttcctgtaactctgtatacagtgcttttctgcaaggtaaaaataacctgtctatgcatctgatttttgctacagtttagacactgtggtttacaaaacagcatgcactcaacttgggactttatgaaaagtactgaatgagcaggaaaaggcacatactcagttttttaaatgtacaatcaacaagtaaaaataacctcatgtaagtaagccatttttatttgcctttctagatattttattttattgtggaaaactgtaaacatggtcagatttggctttttttttcattaactgagcaagactttcaggatattgtagatgcacagatggtaggttgtcctgaattctacattattagattactttaattgagatttgttaaaacggttaggactgttttgtccaggaaagataagaggaccaaacatataaggtgaaattcagaattccgtttccttctaactaatgaaaaactgcttactaaaaaaaaattttatactttccttgctaaggtcccatatattgatttgtacagatccacttagtcattttctcctttttttaagaaccattttcatctgatttttaaactcacgataccagttatctgttaatcaaaattgcattttacaatttaataatgtgatatttcctatgtctacagcataccttattaggtataaaacctactgcaacttagaaaaaggaaagaaaaaagaaaacttttccaactgctgcattaagatagggtggattttatgtgcttttttttttaagarttgaatttcttttcctgacttttaccttttacagcgtattacttagtgaacattacttttcagaataratcctaatatttattgagggcctatgtgctaa

SEQ ID NO: 215 - DNA, 1822 bp, Homo sapiens
  misc feature (1816): n equals a,t,g, or c
  misc feature (1821): n equals a,t,g, or c
cttagtgaacattacattttcagaatagatcctaatattttattgagggcctatgtgctaaaaactatgcatatctatatattggccaattatctttaataatttaccttttgaaattgcatgtttatcatatatccttaagtggacacatacagtgccatgttgatgtgcctctcagttttattgaaaagctgccccacagcccatgtctcttgttctctgcaatgcctcaagggagtgagctctcaaccacagatagctgtggcttctcagaagcagctcattgccaaggccaggctgagaggggacctgcttgctgtggtggttgcctagcccagatgagcatttacctaccaccttcccacttggctagctgtcctttggatatgtgctgttaactggggaaggcatctaactagtagcctgctactccatagtatggctcaatagatgacacatcattttgacattatcaataggagaaaagaaaactaacccttcttctgattgtttggagccatagttgtctcagatgttctaattctctttgtatgcttggaaacagcatagatatgttgctgtggttttcagaattttctcttttaatcacaagaagccttttaaaaaatgacttacacatattctcaatgtacagtaaaacagacagaagtgagcttatctgtttgatgctgtggcagggtcccagtcactgggcatatcctccttctccttaaccagctcctcagcagcccctgagtcacctgcacaaggtgcttgggaactgctggttatgagcattcctggttttcttcagccaaataacaggtaatcactgtcaattggatttggtcttcattattttatattctgattttatcagaattattctattttaaaattgttttaaaatttaaaaacatttaattcatgatcatgttcatcagtagatgctattattcataagaactgtgattccagcaaactagggtaattggtgcctttttacagttttgaataaaagcatttacaatttctaaattatcagttttcacagtttcagcactcaacctcatcatacgctgatttaatattgttttacattaaaatagtccttttccctgttgtgccaccattcatttaagtgctgtttgtwcttaaaatgcatttaaaggaaaaattacccatattgactttcacacytcatataatcagatctattacaaatatatatcggagtgacggtgcccaggatagatgtaatatttcttacagatgctggcacagaggaaataatataccagctaatctagtcacctaaccttgtggttagaattgcaattttaagaccagaaaaatttgaagtctgatcagagatttacaactgttcattatagtggtgccttaggcaatctttccaaagtaaattcagggccccattgctacttatgccatatttggacatactttttttttcttcaattttgtaaacttcctggaaagctgtcttcactaagtatcccctagtctctatatatgtggttagtagtcatggaaatgacacataaagtacgccagaagtttgatggaacgtgttagaaactgttttgtgcttttatggatgtcatacttgacaatacatgtgtaagttactaatatatgaattgatgctaaatatatcttacatttgaattccttttggataaagttatttcttgatgtgacasagtagtgtgttttcatttttattctttacatgtgaccaaaacaatagaaaagttaaaaataaaatatagtgttttaggtggcaaaaaaaacnactgna

SEQ ID NO: 216 - DNA, 3127 bp, Homo sapiens
acccacgcgtccgcccacgcgtccggctccgggggtgtgtggacgccgctttgttgcctgaggtgggtggcggtggaagttaagggagtcaggggctatcgctcctcgagactcgcagtcgcggccactgcagtcacttcgccagttagcccttagggtaggagtcgcgccggcagcagccatgagcggcggcgtgtacgggggagatgaagttggagcccttgtttttgacattggatcctatactgtgagagctggttatgctggtgaggactgccccaaggtggattttcctacagctattggtatggtggtagaaagagatgacggaagcacattaatggaaatagatggcgataaaggcaaacaaggcggtcccacctactacatagatactaatgctctgcgtgttccgagggagaatatggaggccatttcacctctaaaaaatgggatggttgaagactgggatagtttccaagctattttggatcatacctacaaaatgcatgtcaaatcagaagccagtctccatcctgttctcatgtcagaggcaccgtggaatactagagcaaagagagagaaactgacagagttaatgtttgaacactacaacatccctgccttcttcctttgcaaaactgcagttttgacagcatttgctaatggtcgttctactgggctgattttggacagtggagccactcataccactgcaattccagtccacgatggctatgtccttcaacaaggcattgtgaaatcccctcttgctggagactttattactatgcagtgcagagaactcttccaagaaatgaatattgaattggttcctccatatatgattgcatcaaaagaagctgttcgtgaaggatctccagcaaactggaaaagaaaagagaagttgcctcaggttacgaggtcttggcacaattatatgtgtaattgtgttatccaggattttcaagcttcggtacttcaagtgtcagattcaacttatgatgaacaagtggctgcacagatgccaactgttcattatgaattccccaatggctacaattgtgattttggtgcagagcggctaaagattccagaaggattatttgacccttccaatgtaaaggggttatcaggaaacacaatgttaggagtcagtcatgttgtcaccacaagtgttgggatgtgtgatattgayatcagaccaggtctctatggcagtgtaatagtggcaggaggaaacacactaatacagagttttactgacaggttgaatagagagctgtctcagaaaactcctccaagtatgcggttgaaattgattgcaaataatacaacagtggaacgsaggtttagctcatggattggcggctccattctagcctctttgggtacctttcaacagatgtggatttccaagcaagaatatgaagaaggagggaagcagtgtgtagaaagaaaatgcccttgagaaagagttcccaagcttctaccttccttttgtcaccttacgtttcatagctttagtatactcaggaaaagaatgaccatcttttgtagaatgtttatacatttttgcatatttcaatttccacttaaattttttaaagctttaactggctctataaattaagtttgtgctttccttgaaatgcacttattcttattacaagcattttataattttgtataaatgtctattttctctaaatattttgctttcagtaaaatgctttccaactctgtttagtgtattaattaccagtggattggtagaactgctttttattgactagtaaaagttactgcctatgctttttaccttaggcttacagaattaaataaaaattagccattccagaaatatattttggactgttgtgcactgtgattactactttaaggactaaatgtatttctcattwttttgaatcaaagtcctccgtttattaacagcaatacccacatcctcttcatagcctattaacaacagaggtaaaactattattcaaattcaaaaactacggtattgcctttgctgtggcagttaccatcaccttcacactctaaggtagcaggtgacatttaaagcctgcttaaatgtcagaatttataaagtgggaatctcatctgaactttatacctgatttttagaagcaaattagcttctaccaaattagctaattagcatgccatattcacacttagaacaactgattagtaaagtcacttgactaaaaacagaatttctttataaaccacttaacatatttactcctgtacacagactattcaagaaaaacaaaatggtaaatttaatagttcagacatcttagacaagacttgacttttgggcttcagcaagatgtggaaacttttttaaaagaatttttgctttctttctctctaaattttccttccgtgctttgatgcgggctcgtttctcacgttccagtctgagaaaatggtccacataaggcaaggcaaagaatcgtttcctattgtatcttttatttaggtgccaaggtataacccactgcttgaacttgtgccagatgattcttccaaagatgtctcttctccaagcaccaggtctagctctttcttgaccagtctgaagaagccttagggcatcttctctttcctggacaactttatctaatgcatccatggaatctactaccttatctaaccgctctggacttggcattggcaatctctgccgcttggcctcctgctctagggttagaagcatgtttctttctttcagtaagacataccaaagtttgtgtaaatcttcattacttttgttccttagttgctgacaggtccatgctgctccagattttactttttcttgcccccagttttttgggtcatcaaaaaattcttctagtcctttccttgacaatgtggtatgaagtaatctatattggtgaaaggatgtcacatttggtgtactcttaggcaacaaactaagaaaaaaccctgtgcaggcagggacctgaggagttattaacgatcgggaagatttcagggcggatgaaactctcctacaaagaagggccaaaccggccgcagccatgttttcgcataactccccttctgtcgtcttctcgcagccgta

SEQ ID NO: 217 - DNA, 1529 bp, Homo sapiens
  misc feature (57): n equals a,t,g, or c
  misc feature (458): n equals a,t,g, or c
cactgcgctgtgcccgcgcatccacgaggtgcccctgctggagccccttgtgtgcangaagatcgcccaggagcggctcacagtcctcctgttcctggaggactgcatcatcactgcctgccaggagggcctcatctgcacctgggmccggccgggcaaggcgttcacagacgaggagaccgaggcccagacaggggaaggaagttggcccaggtcacccagcaagtcagtggtagagggcatctcctcccaaccaggcaactccccgagtggcacagtggtgtgaagccatggatatcgggcccccccaaccccatgcccccagcctcctagccataaccctccctgctgacctcacagatcaacgtattaacaagactaaccatgatggatggactgctccagtccccccacctgcacaaaatttgggggccccccagactggcccggacacgggngatgtaatagcccttgtggcctcagccttgtcccccacccactgccaagtacaatgacctcttcctctgaaacatcagtgttaccctcatccctgtccccagcatgtgactggtcactcctggggagasactccccgcccctgccacaagagccccaggtctgcagtgtgcccctcagttgagtgggcagggccgggggtggtccagccctcgcccggcccccaccccagctgcccttgctattgtctgtgcttttgaagagtgttaaattatggaagcccctcaggttcctccctgtcccgcagacctcttatttatactaaagttccctgttttctcagcgggtctgtccccttcggaggagatgatgtagaggacctgtgtgtgtactctgtggttctaggcagtccgctttccccagaggaggagtgcaggcctgctcccagcccagcgcctcccaccccttttcatagcaggaaaagccggagcccagggagggaacggacctgcgagtcacacaactggtgacccacaccagcggctggagcaggaccctcttggggagaagagcatcctgcccgcagccagggcccctcatcaaagtcctcggtgttttttaaattatcagaactgcccaggaccacgtttcccaggccctgcccagctgggactcctcggtccttgcctcctagtttctcaggcctggccctctcaaggcccaggcaccccaggccggttggaggccccgacttccactctggagaaccgtccaccctggaaagaagagctcagattcctcttggctctcggagccgcagggagtgtgtcttcccgcgccaccctccaccccccgaaatgtttctgtttctaatcccagcctgggcaggaatgtggctccccsgccaggggccaaggagctattttggggtctcgtttgcccagggagggcttggctccaccactttcctcccccagcctttgggcagcaggtcacccctgttcaggctctgagggtgccccctcctggtcctgtcctcaccaccccttccccacctcctgggaaaaaaaaaa

SEQ ID NO: 218 - DNA, 1100 bp, Homo sapiens
acataggtcctggtgagccaaacttttctcttattgttactttagatcatggagtgcatcggatcctttctataccaacgwcmggagcatcttgactctctccacaatggactcatctacttgttaaaggggcagtagtactttgtgggagccagttcacctcctttcctaaaattcagtgtgatcaccctgttaatggccacactagctctgaaattaatttccaaaatctttgtagtagttcatacccactcagagttataatggcaaacaaacagaaagcattagtacaagcccctcccaacacccttaatttgaatctgaacatgttaaaatttgagaataaagagacatttttcatctctttgtctggtttgtcccttgtgcttatgggactcctaatggcatttcagtctgttgctgaggccattatattttaatataaatgtagaaaaaagagagaaatcttagtaaagagtattttttagtattagcttgattattgactcttctatttaaatctgmttctgtaaattatgctgaaagtttgccttgagaactctatttttttattagagttatatttaaagcttttcatgggaaaagttaatgtgaatactgaggaattttggtccctcagtgacctgtgttgktaattcattaatgcattctgagttcacagagcaaattaggagaatcatttccaaccattatttactgcagtatggggagtaaatttataccaattcctctaactgtactgtaacacagcctgtaaagttagccatataaatgcaagggtatatcatatatacaaatcaggaatcaggtccgttcaccgaacttcaaattgatgtttactaatatttttgtgacagagtataaagaccctatagtgggtaaattagrtactattagcatattattaatttaatgtctttatcattggatcttttgcatgctttaatctggttaacatatttaaatttgctttttttctctttacctgaaggctctgtgtatagtatttcatgacatcgttgtacagtttaactatatcaataaaaagtttggacagtaaaaaaaaaaaaaaaaaactc

SEQ ID NO: 219 - DNA, 1792 bp, Homo sapiens
  misc feature (475): n equals a,t,g, or c
  misc feature (476): n equals a,t,g, or c
ccgtggggagcgtggcgtcagggggcccgcgcggcgcagtcccccttcagcatcccgaacagcagcagcgtcccgtacggctcgcaggactcggtgcacagcagccctgaggacggcggcggcggcgsggaccgcmtgggcgggaccggcgggccgcgcctggtgatcggctccttaccagctcacctctcgccgcacatgtttggaggatttaagtgccctgtatgctcaaaatttgtatcctcagatgaaatggatttgcatcttgtaatgtgtttaacaaagccacgaataacctataatgaggatgtactgagtaaagatgctggggaatgtgcaatatgccttgaagaattgcagcagggagatactatagcacgactgccttgtctatgcatatatcataaaggctgcatagatgaatggtttgaagtaaatagatcttgccctgagcacccttcagattaagcgtcannttcctgttttataggttttcttgtcttgacaagatgcttgaaaaaccaagaggayatgaaaatctgtctctggagaaacaaagacgcaggcatactcagccagaaatctgagttttgtgagacttggtaatacagagatggacaatcgtactggggtaaaaaaaccctgctgaagagaggacagtgaccacagaactcagtgtaccaaacatgcatacaaaggacacacagggattttgaaaatgctgcacatcccttaatagtcatctacataggtaatactgataaacattttgtattcagacgccaaagttaactgatttaaaagttgatttactttttattaagttctccagagctgcacaactagttatgttttgatttgttttgttttttaatttggggtctctttgttttccccaacataatgttcataatgtttctgcattcatctgttcttaaattgaaaaacatataatttacttcttataaattgaagtcttaaatgtgaaaccaagaaatgtaatcaagcagtaaaaacatctgaatgtagaccatgatctcaagttcttccattttctcccccacgagtggaaaatagacttctacataggaaagctaaaatatgttaatatttttaaattaaaggtttaatatcagaatgcagtccaaagagcaaatcatattacataattacattttaattaaatatagaatattctactgaattgcaatttattaaatattcttatcctcttaaataaaactgctcaacagttaatcagcagtgaatcatcttgcagctatgcaatttaaaaaaaatacagattaccaatttcaagtgctgccagctaaaataactgttttaacgggtatcttttgtttgktcttttcacttaattattttattgtgctttgcatctccaggcagttctctcacatttgggtaaaatgtttagcaggctgtaaacttaagaaaagggtaaaataaaattttctggagaggaacttggaatttgagggagattttatatacctttaaaaactgtaatttaattgggatgccaggtttatagcaatttgcaactttaattttccagataatctggaggttagcatttgataaatgattttttaaagtagatatgaagattttgttaatttataatttattcatgtgttattactgtaattgaaaatgttatagacacttttaaattcagtttgtgtagaaagaaatgtgttaaacaaaattatgttaataaatattcccmcataataaaaaaaaaaaaaaaaaaaaaaaaaaaaaaaaaaaa

SEQ ID NO: 220 - DNA, 1310 bp, Homo sapiens
tctgcctgggatgtaaaccggaccagccgctgcgggcagaaggaaggctcttggctccttcgggaaacccagccccgtcaccgggctccgagcggctcgcaggcgacgacacgkcctcagccccggcagcgccyagcgkcggctgcggaaagcggagggagtccgacgcgggcgcgggcggggagcgtgcgtccgttcgcacaggcagcgggaggaggggcggcgcgaaccatggccggggacagcgagcagaccctgcagaaccaccagcagcccaacggcggcgagcccttccttataggcgtcacgggggaacagctagcggcaagtcttccgtgtgtgctaagatcgtgcagctcctggggcagaatgaggtggactatcgccagaagcaggtggtcatcctgagccaggatagcttctaccgtgtccttacctcggagcagaaggccaaagccctgaaggsccagttcaactttgaccacccggatgcctttgacaatgarstcattctcaaaacactcaaagaaatcactgaagggaaaacagtccagatccccgtgtatgactttgtctcccattcccggaaggaggagacagttactgtctatcccgcagacgtggtgctctttgaagggatcctggccttctactcccaggaggtacgagacctgttccagatgaagctttttgtggatacagatgcggacacccggctctcacgcagagtattaagggacatcagcgagagaggcagggatcttgagcagattttatctcagtacattacgttcgtcaagcctgcctttgaggaattctgcttgccaacaaagaagtatgctgatgtgatcatccctagaggtgcagataatctggtggccatcaacctcatcgtgcagcacatccaggacatcctgaatggagggccctccaaacggcagaccaatggctgtctcaacggctacaccccttcacgcaagaggcaggcatcggagtccagcagcaggccgcattgacccgtctccatcggaccccagcccctatctccaagagacagaggaggggtcaggaggcactgctcatctgtacatactgtttcctatgacattactgtatttaagaaaacaccatggagatgaaatgcctttgattttttttttctttttgtactttggaacgacaaaatgaaacagaacttgaccctgagcttaaataacaaaactgtgccaactactactggtgatgcctaattatgaatccaacgtgtaaccagttataaatacatatatatataaaaaaggaaaaaaaaa

SEQ ID NO: 221 - DNA, 1369 bp, Homo sapiens
  misc feature (1347): n equals a,t,g, or c
ggcacgaggaatgtttggtttgggaaatgagtttaaacccctcaatgtacaggaaagggaagcacagtttggaacaacagcagagatatatgcctatcgagaagaacaggattttggaattgagatagtgaargtgaaagcaattggaagacaaaggttcaaagtccttgagctaagaacacagtcagatggaatccagcaagctaaagtgcaaattcttcccgaatgtgtgttgccttcaaccatgtctgcagttcaattagaatccctcaataagtgccagatatttccttcaaaacctgtctcaagagaagaccaatgttcatataaatggtggcagaaataccagaagagaaagtttcattgtgcaaatctaacttcatggcctcgctggctgtattccttatatgatgctgagaccttaatggacagaatcaagaaacagctacgtgaatgggatgaaaatctaaaagatgattctcttccttcaaatccaatagatttttcttacagagtagctgcttgtcttcctattgatgatgtattgagaattcagctccttaaaattggcagtgctatccagcgacttcgctgtgaattagacattatgaataaatgtacttccctttgctgtaaacaatgtcaagaaacagaaataacaaccaaaaatgaaatattcagtttatccttatgtgggccgatggcagcttatgtgaatcctcatggatatgtgcatgagacacttactgtgtataaggcttgcaacttgaatctgataggccggccttctacagaacacagctggtttcctgggtatgcctggactgttgcccagtgtaagatctgtgcaagccatattggatggaagtttacggccaccaaaaaagacatgtcacctcaaaaattttggggcttaacgcgatctgctctgttgcccacgatcccagacactgaagatgaaataagtccagacaaagtaatactttgcttgtaaacagatgtgatagagataaagttatctaacaaattggttatattctaagatctgctttggaaattattgcctctgatacatacctaagtaaacataacattaatacctaagtaaacataacattacttggagggttgcagtttctaagtgaaactgtatttgaaacttttaagtatactttaggaaacaagcatgaacggcagtctagaataccagaaacatctacttgggtagcttggtgccattatcctgtggaatctgatatgtctggtagcatgtcattgatgggacatgaagacatctttggaaatgatgagattatttcctgtgttaaaaaaaaaaaaaaaaaaatngctgcggccgacaagggaattc

SEQ ID NO: 222 - DNA, 792 bp, Homo sapiens
  misc feature (573): n equals a,t,g, or c
  misc feature (585): n equals a,t,g, or c
  misc feature (599): n equals a,t,g, or c
  misc feature (636): n equals a,t,g, or c
  misc feature (699): n equals a,t,g, or c
  misc feature (772): n equals a,t,g, or c
tgcgagaagacgacagaaggggagagacttgagggaggcgctgcgactgacaagcggctctgcccgggaccttctcgctttcatctagcgctgcactcaatggaggggcgggcaccgcagtgcttaatgctgtcttaactagtgtaggaaaacggctcaacccaccgctgccgaaatgaagtataagaatcttatggcaagggccttatatgacaatgtcccagagtgtgccgaggaactggcctttcgcaagggagacatcctgaccgtcatagagcagaacacagggggactggaaggatggtggctgtgctcattacacggtcggcaaggcattgtcccaggcaaccgggtgaagcttctgattggtcccatgcaggagactgcctccagtcacgagcagcctgcctctggactgatgcagcagacctttggccaacagaagctctatcaagtgccaaaccccacaggcttgcttcccccgagacacccattcttacccaaggtgcccaccctttcccttacccaaaaaatcaagggggaaatttttacccaaaggttcccccaactttnggcccaacgggnaacccccaaagganacaaaggaggggtattattcagggttgccccacccanttaaggttgcaaggaggaaaggcattttggggggggaacccaggtttggggcccccaacgttngggtataaaaaagggttgtttccaggaggaggattgggcaaagttgttcctattttctttggttaggagcctntttaacaaaacccagcttgt

SEQ ID NO: 223 - DNA, 921 bp, Homo sapiens
  misc feature (851): n equals a,t,g, or c
  misc feature (885): n equals a,t,g, or c
  misc feature (895): n equals a,t,g, or c
  misc feature (911): n equals a,t,g, or c
gccccctctgcagtacccccgcccctcttctcccaccacaatgagatcctaagatggcggtggctgcggcggttggcgctgcgtactgaggtcgaaaaggcggccactggggccgaggcagccaggaaacgtgtgggcctctctgctgcggtctccgagggccgaccgctgccggcggcgggtcgtgggggctgactgtcgctctgcctttgacaggagaggctgcttcttgtagaggaaacagctttgaagtgtggagcgggaaaggagcagtttctgagctgcaaaaactagtttctaaacagagagttaattgttaaatccagtatggccacaggaggaggtccctttgaagatggcatgaatgatcaggatttaccaaactggagtaatgagaatgttgatgacaggctcaacaatatggattggggtgcccaacagaagaaagcaaatagatcatcagaaaagaataagaaaaagtttggtgtagaaagtgataaaagagtaaccaatgatatttctccggagtcgtcaccaggagttggaaggcgaagaacaaagactccacatacgttcccacacagtagatacatgagtcagatgtctgtcccagagcaggcagaattagagaaactgaaacagcggataaacttcagtgatttagatcagagaagcattggaagtgattcccaaggtagagcaacagctgctaacaacaaacgtcagcttagtgaaaaccgaaagcccttcaactttttgcctatgcagattaatactaacaaggagcaaaggtgcattttacaagtcccccaaacagaggaaacggttgggttcagcacagtgttaaaggnttgttttgctttctggtttttaagtaattgaccnctttggccanacttttccgggtgttntgaaggaggt

SEQ ID NO: 224 - DNA, 1979 bp, Homo sapiens
  misc feature (1949): n equals a,t,g, or c
  misc feature (1953): n equals a,t,g, or c
ggcgccgcccaagcgccagacgcgagctgggaaaagggaggcagaggaggcggaggcagaggcagaggcagagcccggtgccgagaccaagcgacagaccggcggggctgggcctcgcaaagccggctcggcgagctctcccgacacccgagccggggaggaaaagcagcgactcctcgctcgcatccccgggagccgcactccagactggcccggtagtcaggggctcaggagcagatcccgaggcaggctttgctcagcctccgacgagggctggccctttggaaggcgccttcaacagccggaccagacaggccaccatgaccgagaattccacgtccgcccctgcggccaagcccaagcgggccaaggcctccaagaagtccacagaccaccccaagtattcagacatgatcgtggctgccatccaggccgagaagaaccgcgctggctcctcgcgccagtccattcagaagtatatcaagagccactacaaggtgggtgagaacgctgactcgcagatcaagttgtccatcaagcgcctggtcaccaccggtgtcctcaagcagaccaaaggggtgggggcctcggggtccttccggctagccaagagcgacgaacccaagaagtcagtggccttcaagaagaccaagaaggaaatcaagaaggtagccacgccaaagaaggcatccaagcccaagaaggctgcctccaaagccccaaccaagaaacccaaagccaccccggtcaagaaggccaagaagaagctggctgccacgcccaagaaagccaaaaaacccaagactgtcaaagccaagccggtcaaggcatccaagcccaaaaaggccaaaccagtgaaacccaaagcaaagtccagtgccaagagggccggcaagaagaagtgacaatgaagtcttttcttgcggacactccctcctgtctcctattttctgtaaataattttctccttttttctctcttgatgctcaccaccaccttttgcccccttctgttctgactttataagagacaggatttggattcttcagaaattacagaataattcatttttccttaaccagttgtgcaaggacagcaacaaccaatctaatgatgagaatgtacttatattttgttttgctattaacctacttacggggttagggatttgcgggggggcttgtgtgttttgttggcttgtttgccatgaaggtagatgtgggtggggagaagacacaaggcagtttgttctggctagatgagagggaacccaggaattgtgaggttagcaggaatatctttagggtgagtgagttttccttgagttgggcacccgttgtgagagtttcagaacctttggccagcaggagagaggtggtagggagcagccagccggcaaaggaaggaggtggaaaaaaaccgccaccgggctgacttccacctcccagtggtgagcagtgggggcccaaacccagtttccttctcatttttgttagtttgccctttcggcctccctattttcttagggaaggggagtggggtccaagtgacagctggatgggagaagccatagtttctcccagtgcagctaggatgtagccattgggggatctttgtggcttcagcaaattctcttgttaaaccggagtgaaaacttcaggggaagggtggggagtcagccaagtgcctcagtgtgccctgttgaaacttaggtttttccacgcaatcgatggattgtgtcctaggaagacttttcttttcctctggatttttgttcctcctgtacaagaggtgtctttgcttggtttggtggggctgcggccacttaaaacctcccgatctctttttgagtcctttttttaaacaagtgttacttgtgccgggaaaattttgctgtctttgtaattttaaaactttaaaataaattggaaaagggaraaaaaaaaagnaaanaaaaaaaaaaaaaaaaaaaaaaaaaa

SEQ ID NO: 225 - DNA, 541 bp, Homo sapiens
  misc feature (506): n equals a,t,g, or c
  misc feature (511): n equals a,t,g, or c
  misc feature (532): n equals a,t,g, or c
tcgacccacgcgtccgcccacgcgtccgggaaacaggagatcgtggatcctccttcaaaaatggaggatggaaagcccgtttgggcgccacaccctacagatggatttcagatgggcaatattgtggatattggccccgacagcttaacaattgaacccttgaatcagaaaggcaagacatttttggctctcataaaccaagtgtttcctgcagaagaggacagtaaaaaagatgtggaagataactgttcactaatgtatttaaatgaagccacactgctccataatatcaaagttcgatatagtaaagacagaatttatacatatgtcgccaacattctgwttgcagtgaatccatactttgacatacctaaaatatatcttcagagcataaagtcatatcaaggaaaatctcttgggacaagaccacctccaggtctttgcaattgctgataagcctttcgggacctggaaggtgccccaagatgagtcagtctaaccatggnatccnggagaatccaggggccggggnaaaccagga

SEQ ID NO: 226 - DNA, 277 bp, Homo sapiens
  misc feature (135): n equals a,t,g, or c
tcgacccacgcgtccgtgaataagcaatctggcctttgagggggctgttgcggtacagacaattctgtggagcggcttcggcggctccgaggagaagcaatatgttaaggatacctctaagaagggccttagtangcctttctaataagtcttccaaaggatgtgttcgaacaactgccacagcagcaagcaacttrattgaagtatttgttgatggtcartctgtcatggtggaaccrggaackacygtcctccaagcttgtgagaaggttggcat

SEQ ID NO: 227 - DNA, 2069 bp, Homo sapiens
  misc feature (2026): n equals a,t,g, or c
  misc feature (2042): n equals a,t,g, or c
  misc feature (2050): n equals a,t,g, or c
  misc feature (2061): n equals a,t,g, or c
  misc feature (2062): n equals a,t,g, or c
gggtcgacccacgcgtccgggcgacattagctagcgctcgctctactctctctaacgggaaagcagcggaatacaagagactgaactgtatctgcctctatttccaaaagactcacgttcaactttcgctcacacaaagccgggaaaattttattagtcctttttttaaaaaaagttaatataaaattatagcaaaaaaaaaaaggaacctgaactttagtaacacagctggaacaatccgcagcggcggcggcagcggcgggagaagaggtttaatttagttgattttctgtggttgttggttgttcgctagtctcacggtgatggaagctgcacattttttcgaagggaccgagaagctgctggaggtttggttctcccggcagcagcccgacgcaaaccaaggatctggggatcttcgcactatcccaagatctgagtgggacatacttttgaaggatgtgcaatgttcaatcataagtgtgacaaaaactgacaagcaggaagcttatgtactcagtgagagtagcatgtttgtctccaagagacgtttcattttgaagacatgtggtaccaccctcttgctgaaagcactggttcccctgttgaagcttgctagggattacagtgggtttgactcaattcaaagcttcttttattctcgtaagaatttcatgaagccttctcaccaagggtacccacaccggaatttccaggaagaaatagagtttcttaatgcaattttcccaaatggagcagcatattgtatgggacgtatgaattctgactgttggtacttatatactctggatttcccagagagtcgggtaatcagtcagccagatcaaaccttggaaattctgatgagtgagcttgacccagcagttatggaccagttctacatgaaagatggtgttactgcaaaggatgtcactcgtgagagtggaattcgtgacctgataccaggttctgtcattgatgccacaatgttcaatccttgtgggtattcgatgaatggaatgaaatcggatggaacttattggactattcacatcactccagaaccagaattttcttatgttagctttgaaacaaacttaagtcagacctcctatgatgacctgatcaggaaagttgtagaagtcttcaagccaggaaaatttgtgaccaccttgtttgttaatcagagttctaaatgtcgcacagtgcttgcttcgccccagaagattgaaggttttaagcgtcttgattgccagagtgctatgttcaatgattacaattttgtttttaccagttttgctaagaagcagcaacaacagcagagttgattaagaaaaatgaagaaaaaacgcaaaaagagaacacatgtagaaggtggtggatgctttctagatgtcgatgctgggggcagtgctttccataaccaccactgtgtagttgcagaaagccctagatgtaatgatagtgtaatcattttgaattgtatgcattattatatcaaggagttagatatcttgcatgaatgctctcttctgtgtttaggtattctctgccactcttgctgtgaaattgaagtgcatgtagaaaaaaccttttactatatgaaactttacaacacttgtgaaagcaactcaatttggtttatgcacagtgtaatatttctccaagtatcatccaaaattccccacagacaaggctttcgtcctcattaggtgttggcctcagcctaaccctctaggactgttctattaaattgctgccagaattttacatccagttacctccactttctagaacatattctttactaatgttattgaaaccaatttctacttcatactgatgtttttggaaacagcaattaaagtttttcttccatgagttgagtccttaagaaaatgattccagttactcattttgcatatttgctattttaacattattggaccctgcatttatagtcctttgatttcttccctctccctggtgtctcccccaagaccccaaataaagcaatacactgttnaacaaaaaaaaaaaanggggggcngccctaggggnnccaagct

SEQ ID NO: 228 - DNA, 471 bp, Homo sapiens
  misc feature (287): n equals a,t,g, or c
  misc feature (372): n equals a,t,g, or c
  misc feature (418): n equals a,t,g, or c
  misc feature (462): n equals a,t,g, or c
ttccagtcagcggctgcagggtcgggctcgcgccgtcctctccccgcccgcgccgkattctaatgtaggaactggtgagaagaaggtgactgaagcctggatttctgaggatgaaaactcacataggacgacgtcagacagactcacggtgatggagctcccctctcccgagtctgaggaagtccacgagcccagattaggggagctcttgggaaatccagaaggtcagagcctggggagttccccctctcaggacaggggctgcaacaggtgacagtgacccattngaagatccagacaggagagacagctcaagtgtgcaccaagtcaggaagaaaccatattctgaaatcagacttcttctggcttcanagagagctccttagaagggggaagccattccttgcgatatcctgtngggaaaccttcacgtttaattcggacctaaataaggcatcggantttcgcatc

SEQ ID NO: 229 - DNA, 1640 bp, Homo sapiens
tcgacccacgcgtccgatggcgactttggtcgaactgccggactcggtcctgctcgagatcttctcttacctcccgggtctgtmaccgctggaagaggctggtggacgaccggtggctgtggcgacatgtcgacctgacgctctacacgatggcgacctaaagtcatgtggcacctccttcgaaggtacatggcatcccggctccattccctgcggatgggtggctacctgttctctggctcccaggccccccagttgtcccctgctctgttgagagccctgggccagaagtgccccaacctgaagcgcctctgcctgcacgtggccgacctgagcatggtgcccatcaccagcctgcccagcaccttgaggaccctggagctgcacagctgcgagatctccatggcctggctccacaagcagcaggaccccaccgtgctgcccctgcttgaatgcatcgtgctggaccgcgtccccgccttccgtgacgagcacctgcagggcctgacgcgcttccgggccttgcgctcgctggtgctgggtggtacctaccgtgtgaccgagacagggctggatgctggcctgcaggagctcagctatctgcagaggcttgaggtgctgggctgcaccctgtctgccgacagcaccctgctggccatcagccgccaccttccgagatgtgcgcaagatccggctgaccgtgagggcctctctgcccctggcctggctgtgctggagggaatgccggccctggagagtctgtgcctgcagggtcccctcgtcaccccagaaatgccctcccccactgaaatcctctcctcctgcctcactatgcccaagctcagagtccttgagctgcaggggctggggtgggagggtcaggaggcggagaagatcctgtgtaaggggctgccccactgtatggtcatcgtcagggcttgccccaaagagtctatggactggtggatgtaactactccacctgcccttgggacccatcccagttttcatcattgagccccagaccctctgagcagcaccttgaagagggcagataatcagacttgaggaaactgaaagccccaggttgagagaacagaggcctagggacctccagaccattggaatcactgtttgccagctgtgtggccttggtcatatcatcagcctctgggaagcctagttcccacatctggaaataaggatgatcatagctacctcacggttacattgcaaagccttactctaaaagctcccagcctccagaggctctcaatgaagagtcaccttcatggtcgtcttcaggaacaggacggatgaagaaggggtggggttaagactcaggggcacctgagggtctgagcccccttatgagtacccaagaaggactgtctatgcatgcacacccacaagcctatacaccatttatatacctacacgcacgcaagagacgcggagagataggcgatgcagactcgcgattcaatgatcgatatgctcataaaagtgctcaattatattttctgtattttgtatgctgtattttccaagacgtatattattttactattaaagaaaaaaatcatttttttttcccgaaaaaaaaaaaaaaaaaaaaaaaaaaaaaaaaaaaaaaaaaaa

SEQ ID NO: 230 - DNA, 1970 bp, Homo sapiens
  misc feature (2): n equals a,t,g, or c
  misc feature (4): n equals a,t,g, or c
  misc feature (1952): n equals a,t,g, or c
  misc feature (1963): n equals a,t,g, or c
cngncccgagcccagagcgccggcggcccgactcccggccgcccctttctttctcctcgccggcccgagagcaggaacacgataacgaaggaggcccaacttcattcaataaggagcctgacggatttatcccagacggtagaacaaaaggaagaatattgatggattttaaaccagagtttttaaagagcttgagaatacggggaaattaatttgttctcctacacacatagatagggtaaggttgtttctgatgcagctgagaaaaatgcagaccgtcaaaaaggagcaggcgtctcttgatgccagtagcaatgtggacaagatgatggtccttaattctgctttaacggaagtgtcagaagactccacaacaggtgaggagctgcttctcagtgaaggaagtgtggggaagaacaaatcttctgcatgtcggaggaaacgggaattcattcctgatgaaaagaaagatgctatgtattgggaaaaaaggcggaaaaataatgaagctgccaaaagatctcgtgagaagcgtcgactgaatgacctggttttagagaacaaactaattgcactgggagaagaaaacgccactttaaaagctgagctgctttcactaaaattaaagtttggtttaattagctccacagcatatgctcaagagattcagaaactcagtaattctacagctgtgtactttcaagattaccagacttccaaatccaatgtgagttcatttgtggacgagcacgaaccctcgatggtgtcaagtagttgtatttctgtcattaaacactctccacaaagctcgctgtccgatgtttcagaagtgtcctcagtagaacacacgcaggagagctctgtgcagggaagctgcagaagtcctgaaaacaagttccagattatcaagcaagagccgatggaattagagagctacacaagggagccaagagatgaccgaggctcttacacagcgtccatctatcaaaactatatggggaattctttctctgggtactcacactctcccccactactgcaagtcaaccgatcctccagcaactccccgagaacgtcggaaactgatgatggtgtggtaggaaagtcatctgatggagaagacgagcaacaggtccccaagggccccatccattctccagttgaactcaagcatgtgcatgcaactgtggttaaagttccagaagtgaattcctctgscttgscacacaagctccggrtcaaagccaaagccatgsagatcaaagtagaagcctttgataatgaatttgaggccacgcaaaaactttcctcacctattgacatgacatctaaaagacatttcgaactcgaaaagcatagtgccccaagtatggtacattcttctcttactcctttctcagtgcaagtgactaacattcaagattggtctctcaaatcggagcactggcatcaaaaagaactgagtggcaaaactcagaatagtttcaaaactggagttgttgaaatgaaagacagtggctacaaagtttctgacccagagaacttgtatttgaagcaggggatagcaaacttatctgcagaggttgtctcactcaagagacttatagccacacaaccaatctctgcttcagactctgggtaaattactactgagtaagagctgggcatttagaaagatgtcatttgcaatagagcagtccattttgtattatgctgaattttcactggacctgtgatgtcatttcactgtgatgtgcacatgttgtctgtttggtgtctttttgtgcacagattatgatgaagattagattgtgttatcactctgcctgtgtatagtcagatagtccatgcgaaggctgtatatattgaacattatttttgttgttctattataaagtgtgtaagttaccagtttcaataaaggattggtgacaaacacagaactcctgctncattgcattgntttgatg

SEQ ID NO: 231 - DNA, 310 bp, Homo sapiens
  misc feature (262): n equals a,t,g, or c
  misc feature (298): n equals a,t,g, or c
gcgagactccgtctcaaaacaaaacaaataaaaaaaacaaacagtattttttaggaattcattttattttaaattttgtaaggaggagttacaaaaagacaaatactacatatgattccacttgtcatacctagagtcaaattcatggagacagaaagtagaaaggtggttaccagcggctgggaaggagagaatgtggagtttaatgggtatagaattttagttttgtaaggtgaaatgagttctggagattggttgcacnaacagtgtgaatatactcaacactactgaactgtanacttaaaatgat

SEQ ID NO: 232 - DNA, 2833 bp, Homo sapiens
  misc feature (1399): n equals a,t,g, or c
  misc feature (2828): n equals a,t,g, or c
ggcagaggccagggccaaggccgaggcggcagggctgcgagaggcggcggcacgacgacggtccctcagcccagccaccatgagcaccaagcagatcacttgcaggtattttatgcatggtgtgtgtcgggaaggaagtcagtgcctattctcacatgacttggcaaacagcaaaccgtccaccatctgcaagtactaccagaagggctactgtgcctatggaactcggtgcagatatgaccacacgaggccctctgctgcagctggaggtgctgtgggcaccatggcccacagtgtgccctccccagctttccacagtcctcaccctccttccgaggtcactgcatccattgtgaaaactaactcacatgaacccggaaagcgtgaaaagagaacattggttcttagagaccgaaatctctctggcatggctgaaaggaagacccagccgagcatggtgagtaatccaggcagctgcagcgacccccagcccagccccgagatgaagccgcattcctacctggatgccatcaggagtggccttgatgacgtggaggccagcagctcctacagcaacgagcagcagctgtgcccctacgcagctgctggggagtgccggtttggggatgcctgtttctacctgcacggggaggtgtgtgaaatctgtaggctgcaagtyttgcacccattcgacccagagcagaggaaggctcacgaaaagatctgcatgttgacgttcgaacacgagatggaaaaggcctttgccttccaggcaagccaggacaaagtgtgcagtatctgcatggaagtgatcctggagaaggcctctgcttctgagaggagatttgggattctctccaattgcaatcacacgtactgtttgtcctgcatccggcagtggcggtgtgccaaacagtttgaaaacccaatcattaagtcttgtccagaatgccgtgtgatatcagagtttgtaattccaagtgtgtattgggtggaagatcagaataaaaagaacgagttgattgaagctttcaaacaggggatggggaaaaaagcctgtaaatactttgagcaaggcaaggggacctgcccatttggaagcaaatgtctttatcgccatgcttaccccgatgggcggctagcagagcctgagaaacctcggaaacagctcagttctcaaggcactgtgaggttctttaattcagtgcggctctgggatttcatcgagaaccgagaaagccggcatgtccccaacaatgaagatgtcgacatgacagagctcggggacctcttcatgcacctttctggagtggaatcatcagaaccctaaagagtagatggttgccctgcatcttgggctccatcggccgaaactttcccaagccagggtgtgcggagnttccctgtactgcagccaaggtgacgtgtgacttggatttgagtggagttgggcttagccttagtctcattcaatctccattattacagccatggggaagagtgaaagatataaagtaacctaattaaatgtatggaattgctatttttatagctgatatagttacacctcaagcccctcaggggtaacaactaacaaacacccaaactgtttggattgattgctttaaaaaacaaacctggctcttayctttgatcttttcttccccagaaatagtaaacttgcagctgcccctaatgcagcatatttttcttaccaaaggagtcttcagccctataaaaggattcctctatagtgtatttctctagtgtatttagtgtgtcgtcaaaattttgatttatacagagctttcaagaacacacaatgcaaagtgagcgcacatagctgttaacaaacatacaacttttttctagggctttaagggtggtcatttttttcaagttctctcaagtgtcccaaatcagggtagcaatcttgttgccacatgtgcagcaaacaaagtggaagtatagatcttcttctcccttagggaggctcttgaaggagcaggaggtacagtactgggtagcagtctggccctcctgtcgtctggttggtgttggggcctccagccagggccctctaggggaaccaagcctctgctctcacctgtgggttcttgcccatcagggtaattgtattgagaactcaaatatacgtgcacttacatgtgtggttcgtactcaagtgatctattatctagcctgcaaagcctggctttgatttgaaattttgtaaaaatttcatggcacccaaggtttctgattctgacccagcagtggtcctgaagagagctgatggcaagtcttgtagtcattttgattttaattgaagggtgagcataaccttgtgaaccagcactagcttgttccaagctggaatttatctaatctatttttgtgtttaaaaaagctgtacctaccaaataaataaatagtttataaaatgtattacttaaggtattagctgagtttagagtactttctgcttaattaatttttatacttaactcttcagtagaggtttacaaagagtacaaaggttaaattacaaattcattcccagcctaggctctgggcacatttcctgttcttgaattctgctcctgaagagggtgaacaaatggggcattcaagttgtgagctcagaattactttaaaaggaggtaacagccagccattacacctaaatttaatttattttattaaaataacataattgagggaccatcagataactgtattttgtcaggtgcaataaaaacaaaattaaaacccaaatcatcaagaaaaaaaaaaaaaaaaaaaaaaaaaaaaaaaaaaaaaaaaanaaaaa

SEQ ID NO: 233 - DNA, 692 bp, Homo sapiens
  misc feature (289): n equals a,t,g, or c
ggcagaggtccaacgtagacagtggtctcatkcactccataggcttaggttaccacaaggatctccagacaagagctacatttatggaagttctgacaaaaatccttcaacaaggcacagaatttgacacacttgcagaaacagtattggctgatcggtttgagagattggtggaactggtcacaatgatgggtgatcaaggagaactccctatagcgatggctctggccaatgtggttccttgttctcagtgggatgaactagctcgagttctggttactctgtttgnattctcggcatttactctaccaactgctctggaacatgttttctaaagaagtagaattggcagactccatgcagactctcttccgaggcaacagcttggccagtaaaataatgacattctgtttcaaggtatatggtgctacctatctacaaaaactcctggrtcctttattacgaattgtgatcacatcctctgattggcaacatgttagctttgaagtggatcctaccagkttagaaccatcagagagccttgaggaaaaccagcggaacctccttcagatgactgaaaagttcttccatgccatcatcagttcctcctcagaattcccccctcaacttcgaagtgtgtgccactgtttataccaggcaacttaccactccctactgaataaagctacagt

SEQ ID NO: 234 - DNA, 1353 bp, Homo sapiens
  misc feature (649): n equals a,t,g, or c
  misc feature (1020): n equals a,t,g, or c
  misc feature (1255): n equals a,t,g, or c
ggcacgagccgatagctgcttcgggattggcgtccgggcggctatctaggggctgctgggaagatggcggactcggtggctagccgatgaggaggccgcggggggaacccggcccccgggccccgagaccgactgagggagcgacctgcgcagggcccggggagtcatggtctccatcacccaactccatgcttcgagtcctgctctctgctcagacctcccctgctcggctgtctggcctgctgctgatccctccagtacagccctgctgtttggggcccagcaaatggggggaccggcctgttggaggaggccccagtgcaggtcctgtgcaaggactgcagcggcttctggaacaggcgaagagccctggggagctgctgcgctggctgggccagaaccccagcaaggtgcgcgcccaccactactcggtggcgcttcgtcgtctgggccagctcttggggtctcggccacggccccctcctgtggagcaggtcacactgcaggacttgagtcagctcatcatccgaaactgcccctcctttgacattcacaccatccacgtgtgtctgcaccttgcagtcttacttggctttccatctgatggtcccctggtgtgtgccctggaacaggagcgaaggctcgcctnccctccgaagccacctccccctttgcagccccttctccgaggtgggcaagggttggaagctgctctaagctgcccccgttttctgcggtatccacggcagcatctgatcagcagcctggcagaggcaaggccagaggaactgactccccacgtgatggtgctcctggcccagcacctggcccggcaccggttgcgggagccccagcttctggaagccattgcccacttcctggtggttcaggaaacgcaactcagcagcaaggtggtacagaagttggtcctgccctttgggcgactgaactacctgcccctggaacagcagtttatgccctgccttgagaggatcctggctcgggaagcaggggtggcanccctggctacagtcaacatcttgatgtcactgtgccaactgcggtgcctgcccttcagagccctgcactttgttttttcccctggcttcatcaactacatcagtggtacgcagccaggatggctggctgggcccctgagggctggagaggcaggggarcaaggtggcctgcagcccagagccccagtccccgcctccccacaggcacccctcatgctctgattgtgcgtcgctanctctccctgctggaaaaggccgtggagctggagtcccaggataacggggtccccggctttcccgaaggcagcaagttgccattttcccagctttcatc

SEQ ID NO: 235 - DNA, 346 bp, Homo sapiens
  misc feature (151): n equals a,t,g, or c
ggcacgagcaggatccaaaatggcagcgctgtcgccttagctgggagagcgagccgttgtggctgtttgggagacttatggtcaccctgaagtactgcctgcctctagtgtcgcgtccctccagtatccgatgggagcgccgtccgcaggnaatgtgtctctctgatcatggtgcctcgtgtccagctctggggaagaccgagacgaaatcgagtcagctggcgttgggagagggcttatttccgcttccgcttgcccactttcaggaatttgattctgagagcagggctgcggttccaggcagggtttgtacacatatttgcgttggaaggaaaaaaagaaccta

SEQ ID NO: 236 - DNA, 2271 bp, Homo sapiens
  misc feature (547): n equals a,t,g, or c
gtcagaggctggaaagtggggactgtattggggtgctggattgtgaatggtgcatggtggacagtgatggaaagactcacctggacaaaccctactgtgccccccagaaagaatgcttcggggggattgtgggagccaaaagtccctacgttgatgacatgggagcaataggtgatgaggtgatcacattaaacatgattaaaagcgcccctgtgggtcctgtggctggagggatcatgggatgcatcatggtcttggtcctggcggtgtatgcctaccgccaccagattcatcgccggagccatcagcatatgtctcctcttgctgcccaagaaatgtcagtgcgtatgtccaacctggagaatgacagagatgaaagggacgacgacagccacgaagacagaggcatcatcagcaacactcggtttatagctgcggtcatcgaacgacatgcacacagtccagaaagaaggcgccgctactggggtcgatcaggaacagaaagtgatcatggttacagcaccatgagcccacaggaggacagtgnaaaatcctccatgcaacaatgaccccttgtcagccggggtcgatgtggggaaaccatgatgaggacttagacctggataccccccctcagactgctgccctactaagtcacaagttccaccactaccggtcacaccaccctacacttcatcatagccaccacttacaggcggccgtcacggtacacactgtcgatgcagaatgctaacaatctcctcacctccacgccaagatgagatctgggagctacagaatgttctggaaagaaaaagaaccggcttaaaacccacagcaagagacctcccttgtgtttgtgctttgtgcagagttgtttgagtcatttcctgcctgtcgacatggttaaaaacgagagaaacaacaacacagtcacatttgtgaagatgtgaggctggttctgaaatggaggggaaataagcctgatgaacagacctgccataacactaatggaaggtaacagaaggcgaacctccaaacacagagacggaacctgcaagtgaagctgagccagaggaatgttccaaagagccagaagcattcagctctccttaactggaagagagaaaaatctgctcacccagagactggaatgtggcacatgcagatacaaatgtgtgcattgaagatttcgctttgtttcttagcggtacctggataccacagttgctgtatggaactcatgttatgctctaaacgatgcatctcagaatttctaagtaaaggattatttttctactatttattgaactttcaaacattctcaaactttggggaaaaggaaaggaaacacaggagaagttttcagcagttgccccgagctgttttgtgtgtaatgaagtggttctttgattaaggagctctatttcttatttaactgatatcccactgccccactccacaaaataggaaaatgaagaaatctttctctctgacttgtttacatcatttcacggaaacacatctttgtttgtaatgcagtattctttctctgtgtttgacagagatggggaggggcagaggaatttaagaggttttaaaagaaatgttatgtttcttatgacttgtttccactcctcgtacaatgctattcttaggtttctacgaaacctaatgttagaaccgcatcctttcagctaagggagggttggatttattttccttgttttagagactacaaatttttaaatatcccattttgactgagaatattgacatataagggaagaagttttctaaattgtgaaagtctggttcttaattaaagaattttttttttaatatcacggttaaaagctgctgccagttagccaagacattatccaccaaattgctttgtgatttatacagggattaatcaaatctggctactataacatggggcattgtaactttaaagtagtgttttaattacagtgatgtattttagactcacattttgtgattcaaatatgttataaaggcattcttgcaccatggtaaagaatgtgtgtggtaaatctccgtttatatgtagttggaaaaaattcactgaataatgttttaatgatagggtattatgatacaatgtaaaaaacaattggttcttcagcagtacagaaagtaaactatatatgtgctatcaggaaaccccttcatactgtgtataaaattgcaatctagtgaaataaactgtatgcaatggaaaaaaaaaaaaaaaaaaaaactcga

SEQ ID NO: 237 - DNA, 3050 bp, Homo sapiens
  misc feature (492): n equals a,t,g, or c
  misc feature (3024): n equals a,t,g, or c
  misc feature (3031): n equals a,t,g, or c
aaattgaaactgaacatgggaccatgccatccttctagcataatggwgaagtctgamctgaggrgtatctttgatgaaagacatttaggaccctagaaactaaatcttgtcaccaagactttatagtaaagtagtagcaaaattatttttaaaagactttcttccttttactacccatttcctctcttgggaaagctgatgagcaaattatccaagactcatttctttattaggcaaagtcagaatatttcccctctgaaaatctgaattatgccctcattctttttcaagaaatatctcaaagagcaaatagaattaaacatgacacttgattgtctgattatttggcatgtataaaattatcatgtggcttaatgtgccttaagtgaaaatttaaacttagacctgaaacctttacagttggatgtagcgttgagcttttgcatgtytyctgtataataaaccactttkgtytkgtytgtttkgtctttnaacctacacctttatcattactctaacagatttagggcttctctttctctacagctaagtaagggaatatgtgcaattatgagacatacaaaaaaggaaagggaaaggacttctaagtagcaaatctgtgccatgaagtagatgtggcgtgaagatacagagcctgaggatagtaattttccctgagccacgcacacaggcttttatttcatgccttttctctttctgtgccgtcacctttgagaaaaacgattgcaccttctccaagtctgcctttttaacagctacagttaagttggcaagacttccccagctctgaatatagccatttgccgactccggcctctttgcgagactgactcaaatctgtgatcttctgttcagcatacacatcagcaaagtgagaagatgagcactaaatataggctctattaactttacttttagatttactgccttcaaaaagtgcctattctgagcaacataaacgttattccttacatatgtatgtacacacggtacccagagtcgtactgtgcagccttcaaaaacataccatcagaaagagtaggtgctgagataaggaaactttgccaaatgaaagaaagtcactcacttccaatatcccctctcaagcggctaccgtgaaacgggctgcaaacacattccctgagcatcccttgctgatacagcttctttatatttatatcctactggatggtagcatattgctaaggtttcctgtactctgcttcaagggaatgtaagctttatggcattgaaacatttaggaaaaaaaaagatgtttaagagaattaatagagccgtagtctgtattaggatgtgtgtcatatgtgtgttctataaactaagcatcggtgggtttagagtgttaaagtgtcagcacattccttctccttttgtctctcaggctaacatgagagaaaatagaaaagtcttggctgtggggattggaagctcagggggccaaatgtccttgccagatccttagagcattactttgactcctaaaaatagtagtgtatgttatttgatggcttttgtttccatagttccatcactgacaaaactgtcaatactgttgatggagcagcagcatagcctagagtgatgcattcttacccagaggtggcaataggagagggtccatgtaaataggacgaggtagacagtgcatgattgtaggagaagggttgaagggaggacatgattccaaaaaagatcgttctcaatgtgtcgtctgactcaaccagctggcagattacacttgccaagtcgttccctttccttctaagtcagttggctccatattcacttgaatatgcctctgtttgggcaaagcaagatacctccacttaacctttatccaaggaagctcttggtgtcctcttggtcataaagttgtctcctacctaacccagttttaccaaatggaagtaaaaggggacaaactatggaagatggactccatgccattgcagtcagccaccattctcttttccatataaggagccccattacataagctacgggtgaggttggaacagctatgtttcataatttcaagagtgtgaccaccctgctctagtcatcatcattggatgaatccagttgactctttggcaaaagggtgatacttttcactaaaaatgcctactcttcctgttgatgttccttttctgtttttaccttgtccaatttccacactagtcattttttttattttttagaggatcagattttagcgctggaaaatgagttcaaaaatttcagtgtaatgtcataaggatgttgggatacagagattttttttttccttggaaacaaatggactgggaagaaacacagcatggctttgctctgagtttcaatctgatgattatgaccatggaagatagtcttatgtaaaggttaaatggtgtttacaagtggatagataaggcggagatggtgagaagccgggttttctctatgctaaatgtgtctactaagagcagcacttcctactagctaagcacaatcatagccccaccgtgatgagctgctagtctgaataacattccctgacttagggaaaggcacacaaaaacatataaagaatatgtctattttcatatgtgtgatactgacagagccatggtattcctaaaatataggtttctcttttttcttgtattcttagcaaattgcatttattcactacattacaaaccatcactgatgtatccaaaatagcacacatagttcagtatgaaaataagagaataaaatctgttataagcaagtgatttaggtattttcttttgtgtttatgcattatctgactatattaaaacctgtttttctatttaccttctatcagttttctctaccaattatgttttttcaatgctctataagaatgaatatggaaattatatttcttttttctgtaaaagagttgcaactactttattatatttagaaatccaataaacttcttattacatttaaaaaaaaaaaaaaaaaatntctcggncgtcaagggaattcagtgg

SEQ ID NO: 238 - DNA, 2802 bp, Homo sapiens
  misc feature (613): n equals a,t,g, or c
  misc feature (1800): n equals a,t,g, or c
gcctgtgccccggcgtccccgggcaccatgctgtccaactcccagggccagagcccgccggtgctgttccccgccccggccccgccgccgcccccgcagcagttcccgcagttccacgtcaagtccggcctgcagatcaagaagaacgccatcatcgatgactacaaggtcaccagccaggtcctggggctgggcatcaacggcaaagttttgcagatcttcaacaagaggacccaggagaaattcgccctcaaaatgcttcaggactgccccaaggcccgcaggaggtggagctgcactggcgggcctcccagtgcccgcacatcgtacggatcgtggatgtgtacgagaatctgtacgcagggaggaagtgcctgctgattgtcatggaatgtttggacggtggagaactctttagccgaatccaggatcgaggagaccaggcattcacagaaagagaagcatccgaaatcatgaagagcatcggtgaggccatccagtatctgcattcaatcaacattgcccatcgggatgtcaagcctgagaatctcttatacacctccaaaaggcccaacgccatcctgaaactcactgactttggctttgccaaggnaaaccaccagccacaactctttgaccactccttgttatacaccgtactatgtggctccagaagtgctgggtccagagaagtatgacaagtcctgtgacatgtggtccctgggtgtcatcatgtacatcctgctgtgtgggtatccccccttctactccaaccacggccttgccatctctccgggcatgaagactcgcatccgaatgggccagtatgaatttcccaacccagaatggtcagaagtatcagaggaagtgaagatgctcattcggaatctgctgaaaacagagcccacccagagaatgaccatcaccgagtttatgaaccacccttggatcatgcaatcaacaaaggtccctcaaaccccactgcacaccagccgggtcctgaaggaggacaaggagcggtgggaggatgtcaaggaggagatgaccagtgccttggccacaatgcgcgttgactacgagcagatcaagataaaaaagattgaagatgcatccaaccctctgctgctgaagaggcggaagaaagctcgggccctggaggctgcggctctggcccactgagccaccgcgccctcctgcccacgggaggacaagcaataactctctacaggaatatattttttaaacgaagagacagaactgtccacatctgcctcctctcctcctcagctgcatggagcctggaactgcatcagtgactgaattctgccttggttctggccaccccagagtgggagaggctgggaggttgggaggctgtggagagaagtgagcaaggtgctcttgaacctgtgctcattttgcaattttatcagtaatttgacttagagtttttacgaaacctcttttgttgtccttgccccactcctctccaccagacgccttcctctctggatactgcaaaggcttgtggtttgttagagggtatttgtggaaactgtcatagggattgtccctgtgttgtcccatctgccctccctgtttctccacaacagcctggggttgtccccgctggctcacgcgttctgggagctcaaggccaccttggaggaggatgccacgcacttcctctctcggagccctcagacatctccagtgtgccagacaaataggagtgagtgtatgtgtgtgtgtgtgtgtgtgtgcacacgtgtgtatgagtgcgcagatctgtgcctgggnatcgtgcatttgaggggccaggggcaggcagggctgcagagggagacggccctgctggggcttaggaaccttctcccttcttgggtctgccctgcccatactgagcctgccaaagtgcctgggaagcccacccagattctgaaacaggccctctgtggcctgtctctattagctgggttccgggaggcagagaggagtgaccgggcactggcactgcgatcaggaagactggacccccagcccccagggcccccctccccccacttagtgctggtcctaggtcctctgaggcactcatctactgaatgacctctctacttccccttcttgccattattaacccatttttgtttattttccttaaatttttagccatttctccatgggccaccgsccagctcatgtaggtgagcctgggcagcttctgttggcagagcttttgcatttcctgtgtttgtcctgggttctggggcatcagccagctaccccttgtgggcaaaggcagggccacttttgaagtcttccctcagatttccattgtgtggcctggtgggtcagggggagtctttgcaccaaagatgtcctgactttgcccccttgcccatcagccatttgccatcaccccaaacaactcagcttcggggccggtgaggggaggggcctcccccagcacagatgaggagcagctggggtaggctgtctgtgccatggccccccactcccccttcccttggagggagaggtggcaggaatacttcacctttcctctccctcaggggcaggtggtggaggggcgcccagggtcgtctttgtgtatgggggaaggcgctgggtgcctgcagcgcctcccttgtctcagatggtgtgtccagcactcgattgttgtaaactgttgttttgtatgagcgaaattgtctttactaaacagatttaatagttaaaaaaaaaaaaaaaaaaaaaaaaaaaaaaaaaaaaaaaaaaaaaaaaaaaaaaaaaaggggg

SEQ ID NO: 239 - DNA, 1537 bp, Homo sapiens
acttaagggggatttctaacgggaaatctcggtgacactatagaaggtacgcctgcaggtaccggtccggaattcccgggtcgacccacgcgtccgctccagggagacctgggtgggcagcgtcgccgtttctcctttcttgggcagtatttttcccagcgccacgcggaggctgggccattatgagctctgcatttccaggacctggtcactattcaggacacggttccagcgcagtggttagccatgtctcagggatgagtgacattccaagatgtggccattgacttctccaaggaagagtggggattcctgaaccctgctcagagagatttgtacacaactgtgatgctggagaattatcagaacctggtctggctgggactttccatttctaaatctgtgatttcactgttggagaaaaggaaactgccttggataatggcaaaagaagagataagaggcccattgccagatgtgccaggtgcagagattaaggagttatctgcaaagagggctattaatgaagtattatcgcagtttgacacagtgataaaatgtacaagaaacgtatgtaaggaatgtggaaatctatactgccacaatatgcagcttactctccataagagaaatcatacacaaaagaaatgcaatcagtgtttagattgtgggaaatacttcactcgtcaatcaactctcattcagcatcaaagaatccacacgggagagagaccctataaatgtaacgaatgtattaaaaccttcaaccagagggcacaccttacctagcatgagagaattcacactggtgagaaaccttacaaatgtaaggaatgcaggaaaaccttcagccagatgactcatctcacacagcatcagactacacatacgagagaaaagttccatgaatgcagtgaatgtggaaaggccttcagccgtgtctcagctcttatagatcaccagcgaattcatagtggagaawakccgtatgaatgtaagragtgtggaagagccttcactcaaagtgcccagctcattakacatcagaaaactcattctggagaaaaaccctatgagtgtagtaagtgtaagaaatcttttgtgcacctgtctwccctgattgaacattggagaattcacactggagaaaaaccatatcaatgtaaggactgcaaaaagaccttttgtcgtgtgatgcagttcactctgcacaggagaattcatactggtgaaaaaccctatgaatgcaaggaatgtggaaagtccttcagcgcccattcttctcttgttactcataagagaacacacagtggagaaaaaccgtataaatgcaaggaatgtggaaaagccttcagtgcgcactcttcccttgttactcataagagaacacacagtggagagaaaccctatacatgccatgcctgtgggaaggcctttaatacttcctccacactttgtcmacatwatagaattcatactggtgaaaaaccctttcagtgcagtcaatgcgggaagtctttagtctttagctgcaggt

SEQ ID NO: 240 - DNA, 1334 bp, Homo sapiens
gaccacgtgcggcggaagggaagtaacgtcagcctgagaactgagtagctgtactgtgtggcgccttattctaggcacttgttgggcagaatgtcacacctgccgatgaaactcctgcgtaagaagatcgagaagcggaacctcaaattgcggcasggaacctaaagtttcagggggcctcaaatctgaccctatcggaaactcaaaatggagatgtatctgaagaaacaatgggaagtagaaaggttaaaaaatcaaaacaaaagcccatgaatgtgggcttatcagaaactcaaaatggaggcatgtctcaagaagcagtgggaaatataaaagttacaaagtctccccagaaatccactgtattaagcaatggagaagcagcaatgcagtcttccaattcagaatcaaaaaagaaaaagaagaaaaagagaaaaatggtgaatgatgctgagcctgatacgaaaaaagcaaaaactgaaaacaaagggaaatctgaagaagaaagtgccgagactactaaagaaacagaaaataatgtggagaagccagataatgatgaagatgagagtgaggtgcccagtctgcccctgggactgacaggagcttttgaggatacttcgtttgcttctctatgtaatcttgtcaatgaaaacactctgaaggcaataaaagaaatgggttttacaaacatgactgaaattcagcataaaagtatcagaccacttctggaaggcagggatcttctagcagctgcaaaaacaggcagtggtaaaaccctggcttttctcatccctgcagttgaactcattgttaagttaaggttcatgcccaggaatggaacaggagtccttattctctcacctactagagaactagccatgcaaacctttggtgttcttaaggagctgatgactcaccacgtgcatacctatggcttgataatgggtggcagtaacagatctgctgaagcacagaaacttggtaatgggatcaacatcattgtggccacaccaggccgtctgctggaccatatgcagaataccccaggatttatgtataaaaacctgcagtgtctggttattgatgaarctgatcgtatcttggatgtggggtttgaagargaattaaagcaaattattaaacttttgccaacacgtagacagactatgctcttttctgccacccaaactcgaaaarttgaagamctggcaaggatttctctgaaaaaggagccattggtatgttggcgttgatgatgataaagcgaatgcmacagtgggatggtctkgaacaggggatatgtttgtttggtcccttctgaaaaagaggtt

SEQ ID NO: 241 - DNA, 2438 bp, Homo sapiens
  misc feature (71): n equals a,t,g, or c
  misc feature (879): n equals a,t,g, or c
ggtgcagttccaacagtaacagcgaaaatcatcgggtgatgcaagtactcaaacagatgccctgaaactgncaccttccaaccttcaaggcttttgaagaacaaagctttattatgcaaacccatcacacagactaaagccacctcttgcaaaccacatacccaaaacaaagaatgccagacagaagacactccaagtcagcccagattattgkggkgccagttccgtaccagkgttkgtcccatacctcttacctttatactcaatatgctccagtcccatttggaattccagktccaatgcctgkccctatgcttattccatcttcaatggatagtgaagataaagtcacagagagtattgaagacattaaagaaaagcttcccacacatccatttgaagctgatctccttgaratggcagaaatgattgcagaagatgaagagaagaagactctatctcagggagagtcccaaacttctgaacacgaactctttctagacaccaagatatttgaaaaaraccaaggaagtacatacagtggtgatcttgaatcagaggcagtatctactccacatagctgggaggaagagctgaatcactatgccttaaagtcaaatgctgtgcaagaggctgattcagaattgaagcagttctcaaaaggggaaactgaacggacctggaagcagattttccatcagactcctttgacccacttaataaaggacgggaatccaggcacgttcccgaacagacgacgacacagagatggcttcccccaacccagacgaagaggacggaagaagtctatagtggctgtggagcccaggagtcttattcaaggagcctttcaaggctgctcagtgtccgggatgacantgaaatacatgtatggggtaaatgcttggaagaactgggttcagtggaaaaatgccaaggaagagcagggggatctaaaatgtggaggggttgaacaggcctcatctagcccacgttctgaccccttaggaagtactcaagaccatgcactctctcaagaatcctcagagccaggctgtagagtccgctctatcaagctgaaggaagacattctgtcctgcacttttgctgagttgagtttgggcttatgccagtttatccaagaggtgcggagaccaaatggtgaaaaatatgatccagacagtatcttatacttgtgccttggaattcaacagtacctgtttgaaaatggtagaatagataacatttttactgagccctattccagatttatgattgaacttaccaaactcttgaaaatatgggaacctacaatacttcctaatggttacatgttctctcgcattgaggaagagcatttgtgggagtgcaaacagctgggcgcttactcaccaatcgccttttaaacaccctycttttcttcaataccaaatacttycaactaaagaatgktactgagcacttgaagctttcctttgcccatgtgatgagacggaccaggactctgaagtacagtaccaagatgacatatctgaggttcttcccacctttacagaagcaggagtcagaaccagataaactgactgttggcaagaggaaacgaaatgaagatgatgaggttccagtgggggtggagatggcagagaatactgacaatccactaagatgcccagtccgactttatgagttttacctgtcaaaatgttctgaaagtgtgaagcaaaggaatgatgtgttttaccttcaacctgagcgctcctgtgtcccgaatagccccatgtggtactccacattcccgatagaccctggaaccctggacaccatgttaacacgtattctcatggtgagggaggtacatgaagaacttgccaaagccaaatctgaagactctgatgttgaattatcagattaaaacggaagtgaggttcttattttcatacatattggtatgcaccaaactgtgaatgcatccagctgttggaaaatgatgtataagtctaagtcctcttgacttgaccataagatcatggaaaacagatgacttgtgaaccccacagtgtggatgtgcaaatgaaaattgaaggaaagaatatgaactgagaaatgttctttggcagtgatatagttcttagacatcttcagaatgactaatttctccgagtggtgcataatcttattttgtttgggagtaacaaatcgtggaatatttttaaggaaaactgttgtataaaactttaccatagtaaccttagaccttagagaggtagctttggagtgaaactttggctgcaataggctactttgcaagccctccgtaaaagtcagaggagagatcagtacagagctaagagtgacatcaaatgaggactgtgggacccagatttgaagacccaataaaaatactcaactttttaaaaaaaaaaaaaaaaaaaaaaaat

SEQ ID NO: 242 - DNA, 139 bp, Homo sapiens
  misc feature (137): n equals a,t,g, or c
aagaccggagcttgtccggaagattkcaaatactgcccgcaaagctcgcgctacaaaaccgggttggarccagwcggttgatggaagttgaacaggtgctggagtcggcgcgcaaagcaatagggactagggatcgncg

SEQ ID NO: 243 - DNA, 479 bp, Homo sapiens
  misc feature (462): n equals a,t,g, or c
gctcgtgccgaattcggcacgaggcagtttttgaaagtttgaaattaagtaaaaattaaaagtcacaaaagattttgcatgtcaagattctagcctttttcttctggtgtactgagaggccagaggagcccattctagggactaagtattgacagaatttggttctgtggcaagaattacctggtgtcctagcactaaggaccagtaggtcagagcccttgacttagatttcaggacaagaaacagaaagattggaataggattgraatggagtctccccgtgattttaaaaaacacttastatggggccasgcgcrckgtggctcaacgcctgtaatcccagcactttgggaggccaagatgggtggatcatgaggtcaggagatcgagaccgtcctggctaacatggtgaaaccccggctctactaaaaatataaaaaaattaacccggccgtggtggcngggcgcctgtagtccca

SEQ ID NO: 244 - DNA, 584 bp, Homo sapiens
  misc feature (582): n equals a,t,g, or c
  misc feature (583): n equals a,t,g, or c
tgggatatctccggagcatttrgataatgtgacagttggaatgcagtgatgtcgactctttgcccaccgccatctccagctgttgccaagacagagattgctttaagtggcaaatcacctttattagcagctacttttgcttactgggacaatattcttggtcctagagtaaggcacatttgggctccaaagacagaacaggtacttctcagtgatggagaaataacttttcttgccaaccacactctaaatggagaaatccttcgaaatgcagagagtggtgctatagatgtaaagttttttgtcttgtctgaaaagggagtgattattgtttcattaatctttgatggaaactggaatggggatcgcagcacatatggactatcaattatacttccacagacagaacttagtttctacctcccacttcatagagtgtgtgttgatagattaacacatataatccggaaaggaagaatatggatgcataaggaaagacmagaaatgtccagaagattatcttagaaggcacagagagaatggaagatcaggtcagagtattattccaatgcttactggagnng

SEQ ID NO: 245 - DNA, 332 bp, Homo sapiens
  misc feature (235): n equals a,t,g, or c
  misc feature (272): n equals a,t,g, or c
  misc feature (288): n equals a,t,g, or c
ggcacagcgttcacccgacagtgttcacagggcccatggtacagagcacggagcagggtcccccaggttgtgcgcttgccagggccacatcttgagccttcgctctgctccttcgagagccgctgctgccccaccccaatccccaaccagccaccccctcctgcctccctgccatctgtccctttcatcctccctggcgtgccaagcgcctgccatggcaccgcctgttacctancccagctacaaatgccagccttgaatctgccctggantcccttcctctaccangtaaacagccttaactcagccctgccactccctgctctgaagct

SEQ ID NO: 246 - DNA, 1617 bp, Homo sapiens
  misc feature (215): n equals a,t,g, or c
cccgagatccctttcccagagtgctctgcgccgwgaagaagcggctcccggggactkggggcattttgtgttggctggagctggagtaacaagatggcgtcgtccgcggagtgacaggggtccctctgggccggagccggcggcagtggtggcagcggtatcgccgccctagctcaccgcgccccttttccagcccgcgacgtcgccgcgcaagnaggcagcggcggccgccgagaaacaagtggcccagcctggtaaccgccgagaagcccttcacaaactgcggcctggcaaaaagaaacctgactgagcggcggtgatcaggttcccctctgctgattctgggccccgaaccccggtaaaggcctccgtgttccgtttcctgccgccctcctccgtagccttgcctagtgtaggagccccgaggcctccgtcctcttcccagaggtgtcggggcttggccagcctccatcttcgtctctcaggatggcgagtagcagcggctccaaggctgaattcattgtcggagggaaatataaactggtacggaagatcgggtctggctccttcggggacatctatttggcgatcaacatcaccaacggcgaggaagtggcagtgaagctagaatctcagaaggccaggcatccccagttgctgtacgagagcaagctctataagattcttcaaggtggggttggcatcccccacatacggtggtatggtcaggaaaaagactacaatgtactagtcatggatcttctgggacctagcctcgaagacctcttcaatttctgttcaagaaggttcacaatgaaaactgtacttatgttagctgaccagatgatcagtagaattgaatatgtgcatacaaagaattttatacacagagacattaaaccagataacttcctaatgggtattgggcgtcactgtaataagttattccttattgattttggtttggccaaaaagtacagagacaacaggacaaggcaacacataccatacagagaagataaaaacctcactggcactgcccgatatgctagcatcaatgcacatcttggtattgagcagagtcgccgagatgacatggaatcattaggatatgttttgatgtattttaatagaaccagcctgccatggcaagggctaaaggctgcaacaaagaaacaaaaatatgaaaagattagtgaaaagaagatgtccacgcctgttgaagttttatgtaaggggtttcctgcagaatttgcgatgtacttaaactattgtcgtgggctacgctttgaggaagccccagattacatgtatctgaggcagctattccgcattcttttcaggaccctgaaccatcaatatgactacacatttgattgggacaatgttaaagcagaaagcagcacagcaggcagcctcttccagtgggcagggtcagcaggcccaaacccccacaggcaagcaaactgacmaaaccaagagtaacatgaaaggttagtarccaagaaccaagtgacgttacagggaaaaaattgaatmcaaaattgggtaattcatttctaacagkgttagatcaaggaggkggttttaaaatacataaaaatttggctctgcgtt

SEQ ID NO: 247 - DNA, 1449 bp, Homo sapiens
  misc feature (1447): n equals a,t,g, or c
cgcggggctggtagcggccggagccgtgcgakttctctaccctgcttcgcgagcgggcgagagaacgcgagtcccaggatccccggcacccasttctcttccactgcattcccccggcgcgtgtgggaccgaggtggacatggatccgcagaggtcccccctattggaagtaaaggggaacatagaactgaagagacctctgattaaggccccttcccagctgcctctctcaggaagcagactcaagaggaggcctgaccagatggaagatggcctggagcctgagaagaaacggacaagaggcctgggtgcaasgaccaaaattaccacatcccacccaagagttccatccctcactacagtgccacagacacaaggccagaccacagctcaaaaagtttccaagaagacaggaccccggtgttccacagctattgccacagggttgaagaaccagaagccagttcctgctgttcctgtccagaagtctggcacatcaggtgttcctcccatggcaggagggaagaaacccagcaaacgtccagcctgggacttaaagggtcagttatgtgacctaaatgcagaactaaaacggtgccgtgagaggactcaaacgttggaccaagagaaccagcagcttcaggaccagctcagagatgcccagcagcaggtcaaggccctggggacagagcgcacaacactggaggggcatttagccaaggtacaggcccaggctgagcagggccaacaggagctgaagaacttgcgtgcttgtktcctggagctggaagagcggctgagcacgcaggagggcttggtgcaagagcttcagaaaaaacaggtggaattgcaggaagaacggaggggactgatgtcccaactagaggagaaggagaggaggctgcagacatcagaagcagccctgtcaagcagccaagcagaggtggcatctctgcggcaggagactgtggcccaggcagccttactgactgagcgggaagaacgtcttcatgggctagaaatggagcgccggcgactgcacaaccagctgcaggaactcaagggcaacatccgtgtattctgccgggtccgccctgtcctgccgggggagcccactccaccccctggcctcctcctgtttccctctggccctggtgggccctctgatcctccaacccgccttagcctctcccggtctgacgagcggcgtgggaccctgagtggggcaccagctcccccaactcgccatgatttttcctttgaccgggtattcccaccaggaagtggacaggatgaagtgtttgaagagattgccatgcttgtccagtcagccctggatggctatccaktatgcatctttgcctatggccagacargcagtggcaagaccttcacaatggagggtgggctgggggagaccccarttggaagggctgatccctcgggncc

SEQ ID NO: 248 - DNA, 1484 bp, Homo sapiens
  misc feature (37): n equals a,t,g, or c
  misc feature (1477): n equals a,t,g, or c
  misc feature (1478): n equals a,t,g, or c
ccacgcgtccgcggacgctggacggacgcgtgggtcnggttaggaggagctaggctgccatcgggccggtgcagatacggggttgctcttttgctcataagaggggcttcgctggcagtctgaacggcaagcttgagcaacgcggtaaaaatattgcttcggtgggtgacgcggtacagctgcccaagggcgttcgtaacgggaatgccgaagcgtgggaaaaagggagcggtggcggaagacggggatgagctcaggacagagccagaggccaagaagagtaagacggccgcaaagaaaaatgacaaagaggcagcaggagagggcccagccctgtatgaggaccccccagatcagaaaacctcacccagtggcaaacctgccacactcaagatctgctcttggaatgtggatgggcttcgagcctggattaagaagaaaggattagattgggtaaaggaagaagccccagatatactgtgccttcaagagaccaaatgttcagagaacaaactaccagctgaacttcaggagctgcctggactctctcatcaatactggtcagctccttcggacaaggaagggtacagtggcgtgggcctgctttcccgccagtgcccactcaaagtttcttacggcataggcgakgaggagcatgatcaggaaggccgggtgattgtggctgaatttgactcgtttgtgctggtaacagcatatgtacctaatgcaggccgaggtctggtacgactggagtaccggcagcgctgggatgaagcctttcgcaagttcctgaagggcctggcttcccgaaagccccttgtgctgtgtggagacctcaatgtggcacatgaagaaattgaccttcgcaaccccaaggggaacaaaaagaatgctggcttcacgccacaagagcgccaaggcttcggggaattactgcaggctgtgccactggctgacagctttaggcacctctaccccaacacaccctatgcctacaccttttggacttatatgatgaatgctcgatccaagaatgttggttggcgccttgattactttttgttgtcccactctctgttacctgcattgtgtgacagcaagatccgttccaaggccctcggcagtgatcactgtcctatcaccctatacctagcactgtgacaccacccctaaatcactttgagcctgggaaataagccccctcaactaccattccttctttaaacactcttcagagaaatctgcattctatttctcatgtataaaactaggaatcctccaaccaggctcctgtgatagagttcttttaagcccaagattttttatttgagggttttttgttttttaaaaaaaaattgaacaaagactactaatgactttgtttgaattatccacatgaaaataaagagccatagtttcaaaaaaaaaaaaaaaaaaaaaaaaaaaaaaaaaaaaaaaaaaaaaaaaaaaaaaaaanngggggg

SEQ ID NO: 249 - DNA, 2422 bp, Homo sapiens
  misc feature (2354): n equals a,t,g, or c
  misc feature (2408): n equals a,t,g, or c
ggtcttgaataaactactataccaggaggcacattttctcgctcaagcatcttacattgaccttctttaaaacaaaaatacgtacaaggcccacgcgtccgcggacgcgtggggagtctttctaatcttccttttctacagacccatctgacctctcccttcctccccaggctgctccttgccaggccgagctaggtcccaattcttcctcagcctctgctcctccaccctataatctttttatcacctcccctcctcacacctgstccggcttacagtttcrttccgtgactagccctccccsacctgcccagcaatttactcttaaaaaggtggctggagctaaaggcatagtcaaggttaatgctcctttttctttatcccaaatcagatagcgtttaggctctttttcatcaaatataaaaayccagcccagttcatgrctygtttggcagcaaccctgagacactttacagccctagaccctaaaaggtcaaaaggccrtcttattctcaawatacattttattacccaatctgctcccgacattaaataaaactccaaaaattarawtcyggccctcaaaccccacaacaggayttaattaacctcrccttcaaggtgtacaataatagaaaaaagttgcaattccttgcctccactgtgagacaaaccccagccacatctccagcacacaagaacttccaaacgcctgaacygcagcrgccaggcgttcctccagaacctcctcccacaggagcttgctacacgtgccggaaatctggccactgggccaaggaatgcccgcagccygggattcctcctaagccrcgtcccatctgtgtgggaccccactgaaaatckgactgttcaactcacctggcagccactcccagagcccctggaacwctggccmaaggctctctgactgactccttcccagatcttcttggcttagcagctgaagactgacactgcccgatcrcctcrgaagcmcccttgaccatcacggatgccgagctatgggtaactctcacagtggaaggtaagcccgtccccttcttaatcaatacggaggctacccackccacattaccttcttttcaagggcctgtttcccttgcctccataactgttgtgggtattgacggccaggcttctaaacctcttaaaactccccaactctggtgccaacttagacaatactcttttaagcactcctttttagttatccccatctgcccagttcccttattaggctgagacactttaactaaattatctgcttccctgactattcctggactacagctgtatctcattgccacccttcttcccaatccaaagcctcctttgygtcctcctcttgtatacccccaccttaacccacaagtataagatatctctactccctccttgacgaccgatcatgcaccccttaccatctcattaaaacctaatcacccttaccgcactcaatgccagtatcccattccgcagcacgctttaaaaagattaaagcctgttatcattcgcctgttacagcatggccttttaaaccctataaactctccttacaattcccccatttttcctgtcctaaaacgagacaagccttacaagttagttcaggatctgcgccttatcaaccaaattgttttgcctatccaccccgtggtgccaaacccatatactctcctatcctcaatacctccctctactacccattattctgttctggatctcagacatgctttctttactattgctttgcacccttcatcccagcctctctttgccttcacttagactgaccctgacacccattaggctcaacaaattacctgggctgcactgccacaaggcttcacagacagcccccattacttcagtgaagcccaaatttcatcctcatctgttagtcatactcccgttcaccgttctcaactactcatacatgccctgctcttctttacactgccggtttacactgtttctccaagacatcacagctgatatctcctggtgctatccccaaactgccactctaaactcttgaagtaaataaataatctttgctggcaggactctgctgaatctccttaggcactctctaatcagatrtcctaggtcctcccaattcttagaccttttatacctgtttttctccttctgttattccatttagtttctcaattcatccaaaaccgtatccaggccatcaccaatcattctataygacaaatgtttcttctwacatccccacaatatcaccccttaccacaagacctcccttcagcttaatctctcccactctaggttcccasgctgcccctaatcccgcttgaagcagncctgagaaacatcggccattctctctccataccaacccccaaaattttggcggnccaaaacttaaaac

SEQ ID NO: 250 - DNA, 574 bp, Homo sapiens
  misc feature (8): n equals a,t,g, or c
  misc feature (38): n equals a,t,g, or c
  misc feature (44): n equals a,t,g, or c
  misc feature (77): n equals a,t,g, or c
  misc feature (558): n equals a,t,g, or c
ttttatgncaaaaaacgcaacccacgcatgaaaaatgngccaantctttccttggaatggtctgtatttgggtgaantccatccagacgtcaattaacacttcctttattttggggttgcccaactcgtttccccaggatttaaagactataacgatgataaaagtcagtttcgcaccctgtcaaaggcttggcccgttgccttttccttcccggcaatactcggttcaattaggtcttgtcccctcattatctgtgaggactgaattccacccccgcttttcaacgcaggctctttgctcgggaaaagtcaaaccatctctcaaaggatcaaagagctcagccatagacagagccgccggaggaaagcggagtcgctgcatcagatgaaaggggcccctcagcctcactcctcaccgcagctcctgggatcttaaagacagggtcaggaggatcaggagggacaagagggatggaggcgaaaggctggatccttaatccaggccggagacaaagccgcgccagggagctcgcggcgcgcggcccctgtcctccggcncgagatgaatcctgcg

SEQ ID NO: 251 - DNA, 1044 bp, Homo sapiens
  misc feature (1010): n equals a,t,g, or c
  misc feature (1011): n equals a,t,g, or c
  misc feature (1012): n equals a,t,g, or c
  misc feature (1013): n equals a,t,g, or c
ggcgggctggctcagtaaagcggaggcagcgggggaagatggcggcggccgttccacagcgggcgtggaccgtggagcagctgcgcagtgagcagctgcccaagaaggacattatcaagtttctgcaggaacacggttcagattcgtttcttgcagaacataaattattaggaaacattaaaaatgtggccaagacagctaacaaggaccacttggttacagcctataaccatctttttgaaactaagcgttttaagggtactgaaagtataagtaaagtgtctgagcaagtaaaaaatgtgaagcttaatgaagataaacccaaagaaaccaagtctgaagagaccctggatgagggtccaccaaaatatactaaatctgttctgaaaaagggagataaaaccaactttcccaaaaagggagatgttgttcactgctggtatacaggaacactacaagatgggactgtttttgatactaatattcaaacaagtgcaaagaagaagaaaaatgccaagcctttaagttttaaggtcggagtaggcaaagttatcagaggatgggatgaagctctcttgactatgagtaaaggagaaaaggctcgactggagattgaaccagaatgggcttacggaaagaaaggacagcctgatgccaaaattccaccaaatgcaaaactcacttttgaagtggaattagtggatattgattgaaatagcagtgcttcagctctaaggatattagcaacaatgataaaacttggccttgaagaaatttacacaactagttagaacttgttactattgtaaaggaagagtcaactggaaaattcaaggagttaataaaatttgtttacttggtcccagcttttgagagataaatcccttatgaatccctggtctaaaatactttcctacagctgtgtaaaatactggtcaaggagaactttttccttttacctcatgttgtaaacttaagtggctcaataaaaattgatccactgtcttgannnnaaaaaaaaaaaaaaaaaaaaaaaaaaaaaaa

SEQ ID NO: 252 - DNA, 1029 bp, Homo sapiens
  misc feature (835): n equals a,t,g, or c
ggcacgagcggccactgcctgccgcgwgcggagccggagcccgagcctgagtggcgccgggcccgacgtggggctcctgggccgcggcggcgggcgggcgatgctccagaggcctgaccagccatggaggccgaggcaggcggcctggaggagctgacggacgaggagatggcggcgctaggcaaggaagagctagtgcggcgcctgcggcgggaggaggcggcgcgcctggcggcactggtgcagcgcggccgcctcatgcaggaggtgaatcggcagctgcagggccacctgggcgagatccgcgagctcaagcagctcaaccggcgtctgcaggcagagaaccgtgagctgcgcgacctctgctgcttcctggactcggagcgccagcgcgggcggcgcgccgcacgccagtggcagctcttcgggacccaagcatcccgggccgtgcgcgaggacctgggcggctgttggcagaagctggccgagctggagggccgccaggaggagctgctgcgggagaacctagcgcttaaggagctctgcctggcgctgggcgaagaatggggcccccgcggcggccccagcggcgccgggggatcaggagccgggccagcacccgagcttgccttgcccccgtgcgggccccgcgacctaggcgatggaagctccagcactggcagcgtgggcagtccggatcagttgcccctggcctgttcccccgatgattgaaggcactgcttcctccacgccgacgcccgcccggattgctccccgagccccgggaccgctgtggacctcgggacctggacgccgtcctgstgcgcaggagggnccgctggcatggactaagaaatcctgacaccaagaagggcccctcgctcttgctggcagggcagcagggggactgaaggctggagcggagggacttgctgggggttggattgggggtaataaacccggacggaagcggaaaaaaaaaaaaaaaaaaaaaaaaaaaaaaaaggrcggccgctcgcgatctagaac

SEQ ID NO: 253 - DNA, 475 bp, Homo sapiens
ggcacagccaggtgctcctgacggacttaagtgccaaaaactgactccatgctaggaaccactgagttctcaaccagtgagtttatgattcctattttaaaaataacctttaaagtctgattataaaagtagtacatagtctttgtggaaaatttattaagtacagtaagtgcagaagaagaaataaatcactcataatcccagcagacagaattaatcactgtcattttaggtgtatttttttgcagagtaaaacatgtaaacattttacatagacataaatacaaacatgataagcattggacatggaaaatgggcagtaaattctgtacatgtgccttcttgtatttttgttgtatttttawatcatgcytttttgcaaaatacattataaattaaacatggaatttcactagttttctgtggtattcattttccatgggctggaataatggtccggtccactatatggggt

SEQ ID NO: 254 - DNA, 1724 bp, Homo sapiens
  misc feature (440): n equals a,t,g, or c
ggcacagtacagcaagagggcaaggacaattgcttaagttgacctctgggtccggaatcgcgggcaaagatggcggcggccaggtgttggaggcctttgctacgcggtccgaggctttcattgcacaccgcggctaatgccgccgccacggctacagaaacgacctgccaagacgtcgcggcgacccccgtcgcgcggtacccgccgattgtggcctccatgacagccgacagcaaagctgcacggctgcggcggatcgagcgctggcaggcgacggtgcacgctgcggagtcggtagacgagaagctgcgaatcctcaccaagatgcagtttatgaagtacatggtttacccgcagaccttcgcgctgaatgccgaccgctggtaccagtacttcaccaagaccgtgttcctgtcgggtctgccgccgcccccagcgancccgagcccgagcccgaacccgaacctgaacctgcgctggacctcgcggcgctgcgtgcggtcgcctgcgactgcctgctgcaggagcacttctacctgcggcgcarcggcgcgtgcaccgttacgaggagagcgaggtcatatctttgcccttcctggatcagctggtgtcaaccctcgtgggcctcctcagcccacacaacccggccctggccgctgccgccctcgattatagatgcccagttcatttttactgggtgcgtggtgaagaaattattcctcgtggtcatcgaagaggtcgaattgatgacttgcgataccagatagatgataaaccaaacaaccagattcgaatatccaagcaactcgcagagtttgtgccattggattattctgttcctatagaaatccccactataaaatgtaaaccagacaaacttccattattcaaacggcagtatgaaaaccacatatttgttggctcaaaaactgcagatccttgctgttacggtcacacccagtttcatctgttacctgacaaattaagaagggaaaggcttttgagacaaaactgtgctgatcagatagaagttgtttttagagctaatgctattgcaagcctttttgcttggactggagcacaagctatgtatcaaggattctggagtgaagcagatgttactcgaccttttgtctcccaggctgtgatcacagatggaaaatacttttcctttttctgctaccagctaaatactttggcactgactacacaagctgatcaaaataaccctcgtaaaaatatatgttggggtacacaaagtaagcctctttatgaaacaattgaggataatgatgtgaaaggttttaatgatgatgttctacttcagatagttcactttctactgaatagaccaaaagaagaaaaatcacagctgttggaaaactgaaaaagcatatttgattgagaactgtgggaatatttaaattttactgaaggaacaataatgatgagatttgtaactgtcaactattaaatacattgatttttgagacaaatatttcttatgtcaacctgttattagatctcttactctgctcaaattcatcactgaaagatttaattttagttaccttttgttgatttaaaaataattgcatttgtatattgctaactgataagacaaattgagttattgagctattaaatgcacattttaatataaatgcagaaatcccaaataaaatgctaacatactgaattcagtaattaaaagaacccactgc

SEQ ID NO: 255 - DNA, 306 bp, Homo sapiens
  misc feature (195): n equals a,t,g, or c
ggcagagcggctcctcagctccaggaccttgctagcagctgccctcaggaagaagtttctcagcagcaggaaagcgtctccamtctccctgccagcgtgcatccccagctgtsccacggmagagcctggagacccagtacctgcagcacagactccagragcccagccttctgtcaaaggcccagaacacctgtnagcatctgctgcagaatcaagcgactctttcttcagaagcagtctcaactgcaggcctattttaatcagatgcagatagcagagagctcctacccacagccaagtcagcag

SEQ ID NO: 256 - DNA, 890 bp, Homo sapiens
  misc feature (862): n equals a,t,g, or c
  misc feature (881): n equals a,t,g, or c
ggcacgaggcccggccgccgcctgccctctccgctggccacctgctgccgcccgcgccatggctggcaaagcacacaggctgagcgctgaggagagggaccagctgctgccaaacctgagggctgtggggtggaatgagctggaaggccgtgatgccatcttcaagcagtttcatttcaaagacttcaacagggcctttgggttcatgacaagagtggccctgcaggctgagaaactggaccaccatcctgaatggtttaacgtgtacaacaaggtccacatcacgctgagcacccatgagtgtgccggcctttcagaacgggacataaacctggccagcttcatcgaacaagtagcagtgtccatgacatagaccctgcccttcctctttgaattcttccgggggaaagggtgactgaactgggagtccagggagggagctgaggagcccttaccctcccaccactcccctcccaagacccagccgccgccgttgagggctgagtccttgctgtgggatgtgccagtgtccccaccaacaccaggaatttagaccttttccctgcaccactctcttcatcctgggggctctgttacactaatttgaataaactctcccctttctttgcaacttcccagcaacaataatgattttcttgccaggccgtctcttgctccctaattcatttcccaggaagctgtgatacagggtgaaataaagtcttgtcttagaaaccaggaccctaaaccccacactatgtaatagaaacacatgtgtttttatgtctcaaataaaactattatatcacttggaaaaaaaaaaaaaaaaaaaaaaaaaaaaaaaaaaaaaaaaaaaaaaaanaaaaaaaaaaaaagaaatnaaaaaaaaa

SEQ ID NO: 257 - DNA, 1159 bp, Homo sapiens
  misc feature (84): n equals a,t,g, or c
ggcacgaggcggagggaagagcgggcgggcgggaggcgccggcgccagacgcggagggaaggagctacgagtagccgccgagangccgcggarccagcgacgaccgacccagccgagccgccgccgccgccgcgcccccatggcggccgccaaggacactcatgaggaccatgatacttccactgagaatacagacgagtccaaccatgaccctcagtttgagccaatagtttctcttcctgagcaagaaattaaaacactggaagaagatgaagaggaactttttaaaatgcgggcaaaactgttccgatttgcctctgagaacgatctcccagaatggaaggagcgaggcactggtgacgtcaagctcctgaagcacaaggagaaaggggccatccgcctcctcatgcggagggacaagaccctgaagatctgtgccaaccactacatcacgccgatgatggagctgaagcccaacgcaggtagcgaccgtgcctgggtctggaacacccacgctgacttcgccgacgagtgccccaagccagagctgctggccatccgcttcctgaatgctgagaatgcacagaaattcaaaacaaagtttgaagaatgcaggaaagagatcgaagagagagaaaagaaagcaggatcaggcaaaaatgatcatgccgaaaaagtggcggaaaagctagaagctctctcggtgaaggaggagaccaaggaggatgctgaggagaagcaataaatcgtcttattttattttcttttcctctctttcctttcctttttttaaaaaattttaccctgcccctctttttcggtttgtttttattctttcatttttacaagggacgttatataaagaactgaactcaacattcaggttgtttttttttttgtttctaagtttttgccctattgaagatgacttcagaaaatccattccccagtcatgaaaatgtactgtgctaactttcttttccatagtggaaacacttatttatagtcatcaaaaatagtgaataaaaaacacatttggaacctggaaaaaaaaaaaaaaaaaaaaaaaaaaaaaaaaaaaaaaaaaaaaaaaaaaaaaaaaaaaaaaaaggggggggacggacgcgtgggcggacgcgtgggcggacgcgtgggtcga

SEQ ID NO: 258 - DNA, 755 bp, Homo sapiens
  misc feature (755): n equals a,t,g, or c
acccacgcgtccggttctagatcgcgagsgccgcctttttttttttwttagaagggccagcttactgttggtggcaaaattgccaacataagttaatagaaagttggccaatttcaccccattttctgtggtttgggctccacattgcaatgttcaatgccacgtgctgctgacaccgaccggagtactagccagcacaaaaggcagggtagcctgaattgctttctgctctttacatttcttttaaaataagcatttagtgctcagtccctactgagtactctttctctcccctcctctgaatttaattctttcaacttgcaatttgcaaggattacacatttcactgtgatgtatattgtgttgcaaaaaaaaaaaaagtgtctttgtttaaaattacttggtttgtgaatccatcttgctttttccccattggaactagtcattaacccatctctgaactggtagaaaaacatctgaagagctagtctatcagcatctgacaggtgaattggatggttctcagaaccatttcacccagacagcctgtttctatcctgtttaataaattagtttgggttctctacatgcataacaaaccctgctccaatctgtcacataaaagtctgtgacttgaagtttagtcagcacccccaccaaactttatttttctatgtgttttttgcaacatatgagtgttttgaaaataaagtacccatgtctttattagaaaaaaaaaaaaaaaaaaaaaaaan

SEQ ID NO: 259 - DNA, 714 bp, Homo sapiens
  misc feature (665): n equals a,t,g, or c
  misc feature (704): n equals a,t,g, or c
gtctattagcttttacctcaaaattttaagccagaactatcatctttgtttttttattttctatctttaaacatttatctgtgaagtgacaaatggcctacagctgtgagagcaaatggacatctcctcctgaactctgagaagatgtcaaaatccacaggcaacttcctcactttgacccaagctattgacaaattttcagcagatggaatgcgtttggctctggctgatgctggtgacactgtagaagatgccaactttgtggaagccatggcagatgcaggtattctccgtctgtacacctgggtagagtgggtgaaagaaatggttgccaactgggacagcctaagaagtggtcctgccagcactttcaatgatagagtttttgccagtgaattgaatgcaggaattataaaaacagatcaaaactatgaaaagatgatgtttaaagaagctttgaaaacagggttttttgagtttcaggccgcaaaagataagtaccgtgaattggctgtggaagggatgcacagagaacttgtgttccggtttattgaagttcagacacttctcctcgctccattctgtccacatttgtgtgaggcacatctgggacactcctggggaaagcctgacttcaattatggaatgstttcatgggcctgtgngmagggtcctgtttaatggaagtttttaattacactccntcacagtatc

SEQ ID NO: 260 - DNA, 525 bp, Homo sapiens
ggctttacggctgcgagaagacgacagaagggggtggtggtcgcgagrgagccggaaagatggtggttaccagatctgcacgggctaaggccagcatccaagccgcgtcggctgaaagttccgggcaaaagagttttgctgctaatgggattcaagcgcatccagaaagtagtactggatctgatgcccgaactactgctgaatcacagaccactgggaagcaaagtttaatccctagaactcctaaagctagaaagaggaagagcagaactacaggctcactaccaaaggggactgaaccatctacggatggagagacctctgaggcagagtcaaattattctgtgtctgagcaccatgataccattttaagggtaactaggagaaggcagatcttaattgcatgctccccagtgtccagtgttaggaaaaagccgaaagtaactccaacaaaggagtcttacactgaagaaatagtgtctgaagcagaatctcatgtttcaggtatttctaggaattgtgctt

SEQ ID NO: 261 - DNA, 3000 bp, Homo sapiens
gaattctcgggtcgacccacgcgtccgacccacgtgtccggcttccccggtgtccccccatccccctccccgcgccccccccgcgtccccccagcgcgcccacctctcgcgccggggccctcgcgaggccgcagcctgaggagattcccaacctgctgagcatccgcacacccactcaggagttggggcccagctcccagtttacttggtttcccttgtgcagcctggggctctgcccaggccaccacaggcaggggtcgacatggcagagacactggagttcaacgacgtctatcaggaggtgaaaggttccatgaatgatggtcgactgaggttgagccgtcaggcatcatcttcaagaatagcaagacaggcaaagtggacaacatccaggctggggagttaacagaaggtatctggcgccgtgttgctctgggccatggacttaaactgcttacaaagaatggccatgtctacaagtatgatggcttccgagaatcggagtttgagaaactctctgatttcttcaaaactcactatcgccttgagctaatggagaaggacctttgtgtgaagggctggaactgggggacagtgaaatttggtgggcagctgctttcctttgacattggtgaccagccagtctttgagatacccctcagcaatgtgtcccagtgcaccacaggcaagaatgaggtgacactggaattccaccaaaacgatgacgcagaggtgtctctcatggaggtgcgcttctacgtcccacccacccaggaggatggtgtggaccctgttgaggcctttgcccagaatgtgttgtcaaaggcggatgtaatccaggccacgggagatgccatctgcatcttccgggagctgcagtgtctgactcctcgtggtcgttatgacattcggatctaccccacctttctgcacctgcatggcaagacctttgactacaagatcccctacaccacagtactgcgtctgtttttgttaccccacaaggaccagcgccagatgttctttgtgatcagcctggatcccccaatcaagcaaggccaaactcgctaccacttcctgatcctcctcttctccaaggacgaggacatttcgttgactctgaacatgaacgaggaagaagtggagaagcgctttgagggtcggctcaccaagaacatgtcaggatccctctatgagatggtcagccgggtcatgaaagcactggtaaaccgcaagatcacagtgccaggcaacttccaagggcactcaggggcccagtgcattacctgttcctacaaggcaagctcaggactgctctacccgctggagcggggcttcatctacgtccacaagccacctgtgcacatccgcttcgatgagatctcctttgtcaactttgctcgtggtaccactactactcgttcctttgactttgaaattgagaccaagcagggcactcagtataccttcagcagcattgagagggaggagtacgggaaactgtttgattttgtcaacgcgaaaaagctcaacatcaaaaaccgaggattgaaagagggcatgaacccaagctacgatgaatatgctgactctgatgaggaccagcatgatgcctacttggagaggatgaaggaggaaggcaagatccgggaggagaatgccaatgacagcagcgatgactcaggagaagaaaccgatgagtcattcaacccaggtgaagaggaggaagatgtggcagaggagtttgacagcaacgcctctgccagctcctccagtaatgagggtgacagtgaccgggatgagaagaagcggaaacagctcaaaaaggccaagatggccaaggaccgcaagagccgcaagaagcctgtggaggtgaagaagggcaaagaccccaatgcccccaagaggcccatgtctgcatacatgctgtggctcaatgccagccgagagaagatcaagtcagaccatcctggcatcagcatcacggatctttccaagaaggcaggcgagatctggaagggaatgtccaaagagaagaaagaggagtgggatcgcaaggctgaggatgccaggagggactatgaaaaagccatgaaagaatatgaagggggccgaggcgagtcttctaagagggacaagtcaaagaagaagaagaaagtaaaggtaaagatggaaaagaaatccacgccctctaggggctcatcatccaagtcgtcctcaaggcagctaagcgagagcttcaagagcaaagagtttgtgtctagtgatgagagctcttcgggagagaacaagagcaaaaagaagaggaggaggagcgaggactctgaagaagaagaactagccagtactccccccagctcagaggactcagcgtcaggatccgatgagtagaaacggaggaaggttctctttgcgcttgccttctcacaccccccgactccccacccatattttggtaccagtttctcctcatgaaatgcagtccctggattctgtgccatctgaacatgctctcctgttggtgtgtatgtcactagggcagtggggagacgtcttaactctgctgcttcccaaggatggctgtttataatttggggagagatagggtgggaggcagggcaatgcaggatccaaatcctcatcttactttcccgaccttaaggatgtagctgctgcttgtcctgttcaagttgctggagcaggggtcatgtgaggccaggcctgtagctcctacctggggcctatttctactttcattttgtatttctggtctgtgaaaatgatttaataaagggaactgactttggaaaaagagaggtaggcaggaggaaggtttatacgcgagtttgtatgggttttgtggggcgttagccggggactttgcgtaagtgggcccgagggggagagaggctcctccgcgagcccccgacgcggttgcgtgtccaggtctttgagccaaagtggtcccaatggtcgcgttggtccaattggcagcttcgg

SEQ ID NO: 262 - DNA, 966 bp, Homo sapiens
  misc feature (935): n equals a,t,g, or c
caaagcagtgcactgaaaatcaatttaagtatttactggagttgtcttgaaggcccaatgggaaatgtcagtaagggcacatgagaaaacactttaagaacctattcttccaaagatctttccagtatcttatgacaacacagtaaattatacccactccaaatgcaaaagctgaaactactctgctttctcacttamctacacttttgactttcgaaatacatttctctcttcggatatgagctgcaaactccttatataaaggctccaactctgcagccctaattattctagttggcccaagaaaaatcctaattgttttatctaaggagacggaattttccaatactgtagaggcatgtgtgtgtgtttgctttaaggaagctgttttggtaataaaaagtcactgraggtcataaattcatgttaacacatccagtgtacatgaagtaggcaccgagttaaactatttgtctactatatagcatgtcatcttaaaagccttattttttcctcaaaatattaactttatttttctccctgtaaaatcaagacacagttaaaatgtagccttcctcattttctgggaatactttctaacaagatatgcttctttccaattggacttctaaatttctagcaattctaacagtgcataaaagaggcaaccccaaaagtgtagcaggtactgaataacagatttgcagccttgggtatccacattaaaatttgaaatctaagtgaattacttcaagctgatttcttaggtcaaggagagattatggtccttaaatgcctgataaggtcacatacacaatttcaagtgcattatagtaaatccatgtgwacagctcctacagctactaacctgcttctgccctcacgggtagcgtgcacaatcttcatcgcatgtcctgggtgggtggggtaggganccagttaaaaaacccccctggggtcatgttc

SEQ ID NO: 263 - DNA, 2738 bp, Homo sapiens
  misc feature (762): n equals a,t,g, or c
ggccggctgagggcacttgctcttgctgtttctgcccctgggttaacattcaagatggtacatgctgaagccttttctcgtcctttgagtcggaatgaagttgttggtttaattttccgtttgacaatatttggtgcagtgacatactttactatcaaatggatggtagatgcaattgatccaaccagaaagcaaaaagtagaagctcagaaacaggcagaaaaactaatgaagcaaattggagtgaaaaatgtgaagctctcagaatatgaaatgagtattgctgctcatcttgtagaccctcttaatatgcatgttacttggagtgatatagcaggtttagatgatgtcattacggatctgaaagacacagtcatcttacctatcaaaaagraacatttgtttgagaattccaggcttctgcagcctccaaaaggtgttcttctctatgggcctccaggctgtggtaaaacgttgattgccaaggccacagccaaagaagcaggctgtcgatttattaaccttcagccttcgacactgaccgataagtggtatggagaatctcagaaattggctgctgctgtcttctcccttgccataaagctacaaccatccatcatctttatagatgaaatagactcctttctacgaaaccgttcaagttctgaccatgaagctacagccatgatgaaagctcagtttatgagtctctgggatggattggatactgatcacagctgccaggtcatagtaatgggagcnrccaatcgtcctcaggaccttgactcggctataatgagaagaatgcctacaagatttcatatcaaccagcctgctttaaaacagagagaagcaatcctgaaactcatcttgaaaaatgaaaatgtggataggcatgtagacctgctagaagttgcccaggaaactgatgggttttcaggaagtgacctaaaagagatgtgtcgagatgctgccctcctctgtgttagagaatatgttaattctacatcagaagaaagccatgacgaagatgaaattcggcctgttcaacagcaggacctgcatcgggcaattgaaaagatgaagaaatcaaaggatgcagcatttcagaatgttttaacacatgtttgtttagattaagagtaaagatcatttgtacagttcagtgatctagtttggtgtgtcctcttatcagttagtggaaatagaacggaaagagtgctctttaaacaatgagggagctcagtgtttatggttttatactctgaattctaagttattgagatatagttgttacataggtggtattactgttggtcaaaaatcatgaggaggaacagttgaatccagcctgaacgtgggtgcttgtgtttgaccttttcagccatatattgtacagccttatagaatctaagctggtcttaaagtcataaatgattcattgggtcattagtgagaaacggggatgtggttaggtgctggttcctagacatgtgagtatgcgtttgtgtgtgtgcgtgtatgtatgtgtatattaaatgtatatatccacacattttatattgacattctgtagatatgtttgaatatagaaactttttttaccccaactactgaatccaggagtaccaaataatatatagtaaaactaagatttaaggttgtgtcaaaaaggtacagtgattcagccatttccatttgtcatttgtttcaaccttttttaagttgagtgtttttatttctgcagttattagttggatcctccacatcttgcatatatacatgggctcaattattatgtttgtcaggataatcaaatgaaaatactagttcagtgatcagcattgaatggttgttaggcagccatgtgctcaacactgatttcacctcttgagtataaactttttaaatttaaattggtttacatgaaagtggattaaaaggcctttcaaaagaatgggtttgaaaaacytcagtaccctttaatacatgtacatttctttccttttttcatttaatgtaacatgtctgttgtaactatgtttcttaaatattattttaaggttatgtgttctttaattatggtcaaatataatttggtcaccaaaaatgaaataatagtttaaaacaagtagctgttactaagtgtgctaaaaatactcattttataattaattttagttttcttagtatattattataaattgtgccctaagtcaggtacaaatgtacacatcaaaatgcccatattgtatctatctgtagtcgtttaatgtgaattatatgtgaatttttttcaaaattttactaaccagaattctgttataggcacctaaccacgcagcatgaggaaaacggcacaacacaatcttgaggtgccttctgaatcatcagattaaattatgcttcatatgtttttgcttttactgtatttctttaaaaactctaaatctttattcatgtgtcactggattaatttatctgataatgtgtctcacaagaatctgttagatcgtttattcttcagttgtactttgaatggtggggtggaagtttcaggtgaacaatggataacaaaaagcaagttatggaagattgtgaagaggatggaaaaactgaatacaagataccaaaaatgaaaaaaagtgtcccatttttaataactatattctattattttataaatgtgtaataaaggggtccctctttaaaaaaaaaaaaaaaaaaaaaaaaaaaaa

SEQ ID NO: 264 - DNA, 1520 bp, Homo sapiens
  misc feature (4): n equals a,t,g, or c
  misc feature (15): n equals a,t,g, or c
  misc feature (18): n equals a,t,g, or c
tcgntccatcataangcnccatgtgcggaattcgctttacggctgcgagaagacgrcagaagsgggcggtcgtgtagctgagcagscctggggcttggttctatgtccctgtggctatgtttccagtgtcctctgggtgtttccaagagcaacaagaaacgaataaatctctgacccttctcaggtgcagccagagagacactagcccactgatggayggacagacgtgggcagggtccgtgtcactaaaccacccaccactgccacagctgcctacaacagacacatcagatgacactccgggcaaataaatgattttcactgaggacttactggttttaataataggtcctggtgtagagaagtccctcaacctattgtgcaatgagttttgagaagcgggtaagctgtatgttttgtggttytgtttcataaatkcatctacaggaagaccaatattgactgaatgaagctttcatttaaagagctaaaatatgctttgtgtttttatatgtggatactactttaaacctaacgactattcattgtatcatagcttgtgatgtattctgctcayggcttttaaggtaaattgtgccatgatccactgccattctaattgctttaacaagtcattaccacactactgttacatcttaattatgcatacagacaggtagacttrttttacatatgtgaactaactagttgtcaaagcaaatgcagattgtattctgcaagtaaagtctttttctctctgaaatttctagggatgttctttaagtgaaattcatattmaaactgaagattttagttacaagaactgagtgcagattaaagtcttttgtgattcaaacatagtcaagagtacaactgtgatatttcatggaagttatgcaataaaatgtctctaacctgcgaamaaatctrtcaagcagacgkcacagtactgaatttgaaaccagaaatactgggtttttatataaatgcttcatagatttgttttatgataaagggcacataactctcctaaacctcacaccacctcttgaataggtataataagtccacatcaatgctgatgccttagctattattaaactcttacagtatgatgtaaagtgaaagtacaatgtaagatcattcctaggccaactttgaccagttttatacagaaacatgtgccaacttttctgtttgcaaggataatatcaaagcaaacaccagaaagttatatctttgatgcattttttcaaaatcatacacataatacacaaaccaaagacaaatgatgaatattaygtcagaaaatataaagtcttcccctttcttcttttgccaagaaagtccaatattttcaccatttttatgcacacaatcaactttatttaagctggaagttaatgtctcattgttttcattgttctaaataaacaccttttcccttgagtattgytctaaaaaaaaaaaaaaaaaaaaaaaaaaaaaaaaaaaaaaaaaaaaaaaaaaaaaaaaaaagg

SEQ ID NO: 265 - DNA, 1568 bp, Homo sapiens
  misc feature (1318): n equals a,t,g, or c
  misc feature (1320): n equals a,t,g, or c
  misc feature (1469): n equals a,t,g, or c
  misc feature (1482): n equals a,t,g, or c
  misc feature (1502): n equals a,t,g, or c
acccacgcgtccgcacaagccgtctacctaaccagaacgggactgttttaccctcagagtctgctggactagctactgccagttgtcctatcactgtctcttctgtagttgctgccagtcagcaactgtgtgtcactaatacccggactccttcatcagtcagaaagcagttgtttgcctgtgtgcctaagacaagtcctccagcaacagtgatttcttctgtgacaagcacttgtagttccctgccttctgtctcctctgcacctatcactagcgggcaagctcccaccacatttctacctgcaagtacttctcaagcacagctttcttcacaaaagatggagtctttctctgctgtgccacccaccaaagagaaagtgtccacacaggaccagcccatggcaaacctatgtaccccatcttcaactgcaaacagttgcagtagctctgccagcaacaccccgggagctccagaaactcacccatccagtagtcccactcctacttccagtaacacacaagaggaggcacagccatccagtgtgtctgatttaagtcctatgtcaatgccttttgcatctaactcagaacctgctccattgactttgacatcacccagaatggttgctgctgataatcaggacaccagtaatttacctcagttagctgtaccagcacctcgagtttctcatcgaatgcagcccagaggttctttttactccatggtaccaaatgcaactattcaccaggatccccagtctatttttgttacgaatccagttactttaacaccacctcaaggcccaccagctgcagtgcagtttcttcagctgtgaacattatgaatggttctcagatgcacataaacccagcaaataagtctttgccacctacatttggcccagccacacttttcaatcacttcagcagtctttttgatagtagtcaggtgccagctaaccagggctggggagatggtccactgtcctcacgagttgctacagatgcctctttcactgttcagtcagcgttcctgggtaactcagtgcttggacacttggaaaacatgcaccctgataactcaaaggcacctggcttcagaccaccttcccagcgagtttctactagtccagttgggttaccatccattgacccatcaggcagctccccatcttcctcttctgctcctctggcaagtttttccggcataccaggaacaagggttttcctgcaagggccagctcctgttgggactcctagtttcaacagacaacatttttctccccatccttggacaagcgcctcaaactcatgtgantntcctattccatstgtttcttcgggatcatcttcamctctttcagccayttcttgccccaccaacgttggggccaaccaaaagggagtcagtgccagtcaaggattcggaaaggttaccttcccccaattggggaacaggaggaggactngggcccgaatttngggcaagggagggggttttntttggcacaaggccccgggggggaaccagtttttttgttcggtttccctttgggacaaagtgggga

SEQ ID NO: 266 - DNA, 545 bp, Homo sapiens
  misc feature (338): n equals a,t,g, or c
  misc feature (394): n equals a,t,g, or c
  misc feature (508): n equals a,t,g, or c
  misc feature (540): n equals a,t,g, or c
agtaagtcgctgattttgtttctttttttcaaacagttttgatttgaagttcctttaaaggctgttggagcttttgcaaatacccagctaatgaaaggcacttaagattgggcccatctgcatcatcacattgaagttttctgtctaaaggaaggttccagctacctgttacccttttgctaaacacagttgcagtgttgcagtgtatttcatgacaaaagtgcactctagttttctgtgaaatgattattttctctgaaatgattcttggtcatgttgagcttctaaatgttaaagagaacatagtgcttttgacctgtgggaaatctcatcttggntaccatggtgctgcacagaccatcaggaagaactgaaaagttcaggcaacttgagnaaaataaagtcaccaccmgcaaggargctgtctaaaataaccggragattattamcccagcacgtggragartgtgctagtgggtagatgttwtggaargctactaggggtccncccttaggtgcctgtgctagtcctaagggggnggtgg

SEQ ID NO: 267 - DNA, 762 bp, Homo sapiens
  misc feature (712): n equals a,t,g, or c
  misc feature (740): n equals a,t,g, or c
aattcggcacagggaatggcggggtctcctgagttggtggtccttgaccctccatgggacaaggagctcgcggctggcacagagagccaggccttggtctccgccactccccgagaagactttcgggtgcgctgcactgcgaagcgggctgtgaccgaaatgctacaactgtgcggccgcttcgtgcaaaagctcggggacgctctgccggaggagattcgggagcccgctctgcgagatgcgcagtggacttttgaatcagctgtgcaagagaatatcagcattaatgggcaagcatggcaggaagcttcagataattgttttatggattctgacatcaaagtacttgaagatcagtttgatgaaatcatagtagatatagccacaaaacgtaagcagtatcccagaaagatcctggaatgtgtcatcaaaaccataaaagcaaaacaagaaattctgaagcagtaccaccctgttgtacatccactggacctaaaatatgaccctgatccagtccttgcctgcattaattgaacaaggagagggattttcccaagttctcaggatgcaacctggtatccaccttcagaggattcaccaagaagtctttttcagttgtcataaggaaaccagatgctwaacctgagactttatwacacagattgaaaccacaccaacagaaactggtttcaggaaaaaccttttacgtggnacttgaaaaagaaagcaaacttaaaganttggcccccaaaagaaaaatgg

SEQ ID NO: 268 - DNA, 1433 bp, Homo sapiens
  misc feature (893): n equals a,t,g, or c
  misc feature (947): n equals a,t,g, or c
gcggaggcctccgtagtgatctggcctttactttctccccgagtcacgggaagccctcgttgacctcacagggtggacacccggaggcgagatcccgttccgcggagcagagccctttctcatggaacaggacgtgtcggggccgctgctggggaaagcagccgggcccccagatgctggagcgggagcaggccccgggcccccgcagaccctccgcggcaccgcccgctcttgtgcctttcccggcgtggctcaccgcctcaccatctcgggtgtcttttaggagaatccttcatgcagctgcagcagcgtctcctgagagagaaggaggccaagatcaggaaggccttggacaggcttcgcaagaagaggcacctgctccgccggcagcggacgaggcgggagttccccgtgatctccgtggtggggtacaccaactgcggaaagaccacgctgatcaaggcactgacgggcgatgccgccatccagccacgggaccagctgtttgccacgctggacgtcacggcccacgcgggcacgctgccctcacgcatgaccgtcctgtacgtggacaccatcggcttcctctcccagctgccgcacggcctcatcgagtccttctccgccaccctggaagacgtggcccactcggatctcatcttgcacgtgagggacgtcagccaccccgaggcggagctccagaaatgcagcgttctgtccacgctgcgtggcctgcagctgcccgccccgctcctggactccatggtggaggttcacaacaaggtggacctcgtgcccgggtacagccccacggaaccgaacgtcgtgcccgtgtctgccctgcggggccacgggctccaggagctgaaactgagctcgatgcggcggttttnaaggcgacggggagacagatcctcactctccgtgtgaggctcgcaggggmgcantcagctggctgtataaggaggccacagttcaggaggtggacgtgatccctgaggacggggcggccgacgtgagggtcatcatcagcaactcagcctacggcaaattccggaagctctttccaggatgaacggacgcccacagaggcctgcggggtgggggcatcgctgcctggggagctgaggcgttaccgctgtgttgggggcagcttggtgtcaggtgcagcagggtcctccttgtctggttctgcacccgtctcgctcccagccatttgctgggatgaccgtgcaggccggtgacacggccgcacctgccccaaagcgggccgcccgagcgtccactccaagcctgagcatccacacaattccagtgggccctcggtgcctgctgtgaactgctttccctcggaatgtttccgtaacaggacattaaacctttgwttttacttccgtgaaaaaaaaaaaaaaaaaaaaaaaaaaaaaaaaggg

SEQ ID NO: 269 - DNA, 2278 bp, Homo sapiens
  misc feature (205): n equals a,t,g, or c
  misc feature (335): n equals a,t,g, or c
  misc feature (2277): n equals a,t,g, or c
cacagtatggaaatacggggaagcaggagatagatccggaaaaataaagttgagaccagactgtagactgtcttgaatgccaagctaaagtgtttatactttattcagtaaataaacaaaactggtagcgcaagaaaaggagtgagcaagtggtaacaacttaaagacaattcattttgctcccacgtgttatatcatgaatttnttgggcccaaagtcatatatagaattttttaaataattgatacttgattaaagaaagcacaaagacataaaaataaaacattcttggtggggggaaatggtttttaagaggcattttattaattttaccncaggtatatttgccctgtgttttacaaacaaaaargaggtatgtgggttacatgtatgaaacactggatcagaaggacccagtatttgatgcaaaaggaatagaaacagtcagaagagattcctgccctgctgtttctaagatacttgagcgttctctaaagctgctatttgaaacgagagatataagtctaattaaacagtatgttcagcgacaatgtatgaagcttctggaaggaaaggccagcatacaagactttatctttgccaaggaatacagaggaagtttttcttataaaccaggagcttgtgtgccagcccttgaacttacaaggaaaatgctgacttatgaccggcgctctgagcctcaggttggggagcgagtgccatacgtcatcatttatgggacccccggagtaccacttatccagcttgtaaggcgcccagtggaagtcctgcaggacccaactctgagactgaatgctacttactatattaccaagcaaatccttccacccttggcaagaatcttctcacttattggtattgatgtcttcagctggtatcatgaattaccaaggatccataaagctaccagctcctcgcgaagtgaacctgaagggcggaaaggcactatttcacaatattttactaccttacactgtcctgtgtgtgatgacctaactcagcatggcatctgtagtaaatgtcggagccaacctcagcatrttgcagtcatcctcaaccaagaaatccgsgagttggaacgtcaacaggagcaacttgtaaagatatgcaagaactgtacaggttgctttgatcgacacatcccatgtgtttctctgaactgcccagtacttttcaaactctcccgagtaaatagagaattgtccaaggcaccatatctccggcagttattagaccagttttaaattgtcaatatcacagtattacaggtgctatttttttcagtgcttaccactaaactgttgtgcatggtgctttttaactttcatcgagtcaaggatgttcactgtctgttatctgaagactatgaagacwtctatgctaaccgaattaaaatgtacttgttgatctctgaatagctcacttcttacaatgtacaaattcctcattctgtcaccttttaaacattgttttataatgcaggtgttggatttgctccagtatgtgtaccatcttgtaaattcatttgagtagatcatgtttacttcccagtggaaggagcactgaaaacctcttaaagaaaaagcatttgtgtgttttccttgaactgtctgtatcaagacgtgttacttcgagatatccattcactttataattttractgcaaaatattttgtaaatacacttttttacttttcaaacgagtaaaataatgtgcaatgatttttatacaaatgattttcaagttgtttggtatatttcctctaggttttgcttgactcaaagtagatcgttattttgatcaaactgtgcaaacagtagtaccacgtgtagcattttgaaacattattttttaaaaaatgctgtcttgctttagctattaatggggcattgtgaggaactgtgcaaagacatttttgttacaaacctgtgggcctgttgcaatactttaaaaataaaaaattttattccatttgcttgttttgtatagacatttctattgcttctaaatatacttaaaatattttctttccttatgtactgtacagttaatcttatttgccatcatcttgaacacaaaatgtgtatttagaatatttgtataactgtgtaaaataaaaaaggaattatgtggtcagtgcattgttttttaaactggaaatcattttgttttaaaagttaataatggaaaccatattaaaattgaataaaatataaaataatataaaaaaaaaaaaaaaaaaaaaaaaaaaattnc

SEQ ID NO: 270 - DNA, 2533 bp, Homo sapiens
  misc feature (1280): n equals a,t,g, or c
  misc feature (2514): n equals a,t,g, or c
  misc feature (2531): n equals a,t,g, or c
cggaataggagcgttgcgagacggtcggttccaagtgggcctgggcgcgggggagaggcgggtctgtcctcgggaactgcaaggccctgtgagcgggaggactgggatcccggccgcggctgctggaagcgtcgaagctcagcggggccgcggacactgacctgtgcttagaactcatcctggcccgcagagcctgccgcgagtccctggcgtcccctgtggcgggctcttggagccactttcccgagcggaagtcagcccgcggctcggactccggcgggacctgctcggaggaatggcgccgccgggttcaagcactgtcttcctgttggccctgacaatcatagccagcacctgggctctgacgcccactcactacctcaccaagcatgacgtggagagactaaaagcctcgctggatcgccctttcacaaatttggaatctgccttctactccatcgtgggactcagcagccttggtgctcaggtgccagatgcaaagaaagcatgtacctacatcagatctaaccttgatcccagcaatgtggattccctcttctacgctgcccaggccagccaggccctctcaggatgtgagatctctatttcaaatgagaccaaagatctgcttctggcagctgtcagtgaggactcatctgttacccagatctaccatgcagttgcagctctaagtggctttggccttcccttggcatcccaagaagcactcagtgcccttactgctcgtctcagcaaggaggagactgtgctggcaacagtccaggctctgcagacagcatcccacctgtcccagcaggctgacctgaggagcatcgtggaggagattgaggaccttgttgctcgcctggatgaactcgggggcgtgtatctccagtttgaagaaggactggaaacaacagcgttatttgtggctgccacctacaagctcatggatcatgtggggactgagccatccattaaggaggatcaggtcatccagctgatgaacgcgatcttcagcaagaagaactttgagtccctctccgaagccttcagcgtggcctctgcagctgctgtgctctcgcataatcgctaccacgtgccagttgtggttgtgcctgagggctctgcttccgacactcatgaacaggctatcttgcggttgcaagtcaccaatgttctgtctcagcctctgactcaggccactgttaaactagaacatgctaaatctgttgcttccagagccactgtcctccagaagacatccttcacccctgtangggatgtttttgaactaaatttcatgaacgtcaaattttccagtggttattatgacttccttgtcgaagttgaaggtgacaaccggtatattgcaaataccgtagagctcagagtcaagatctccactgaagttggcatcacaaatgttgatctttccaccgtggataaggatcagagcattgcacccaaaactacccgggtgacatacccagccaaagccaagggcacattcatcgcagacagccaccagaacttcgccttgttcttccagctggtagatgtgaacactggtgctgaactcactcctcaccagacatttgtccgactccataaccagaagactggccaggaagtggtgtttgttgccgagccagacaacaagaacgtgtacaagtttgaactggatacctctgaaagaaagattgaatttgactctgcctctggcacctacactctctacttaatcattggagatgccactttgaagaacccaatcctctggaatgtggctgatgtggtcatcaagttccctgaggaagaagctccctcgactgtcttgtcccagaaccttttcactccaaaacaggaaattcagcacctgttccgcgagcctgagaagaggccccccaccgtggtgtccaatacattcactgccctgatcctctcgccgttgcttctgctcttcgctctgtggatccggattggtgccaatgtctccaacttcacttttgctcctagcacgattatatttcacctgggacatgctgctatgctgggactcatgtatgtctactggactcagctcaacatgttccagaccttgaagtacctggccatcttgggcagtgtgacgtttctggctggcaatcggatgctggcccagcaggcagtcaagagaacagcacattagttccagaagaaagatggaaattctgaaaactgaatgtcaagaaaaggagtcaagaacaattcacagtatgagaagaaaaatggaaaaaaaaaactttatttaaaaaagaaaaaagtccagattgtagttatacttttgcttgtttttcagtttccccaacacacagcagatacctggtgagctcagatagtctctttctctgacactgtgtaagaagctgtgaatattcctaacttacccagatgttgcttttgaaaagttgaaatgtgtaattgttttggaataaagagggtaacaataggaaaaaaaaaaaaaaaaaaacncgagggggggcccggtncc

SEQ ID NO: 271 - DNA, 1618 bp, Homo sapiens
  misc feature (1612): n equals a,t,g, or c
gtctggtctctcaaagggagcagcctctgtagtgttaaatggctaattaaaataggaagatctttatagccagaaacaacttagtcatcaaatagcaagtgaaaccaaaacgtcagagggattactgtacttggaagtatgttgtgtgtcccaaatgtgaacgaagtattgttagaatttattagatcagcttctttggagatcaaagattggaaatcctagtcatagatattcactggactggctttggactgaaatgctcctttgtaattcttttcctattgtcttttccttctagtgtcccaaaatattttctttaargtcagcacagtactgtatatgaatctttaatgtggtatcatatatgtctacttttgtctgattcatcgatgtattatatctttataattgaatattttagctccgggtcctgttgccccttcaagcagtacatgccaaattataaataggtgctactggccttgagcatatcactgtgggacagttccccaattgtcaagtgtttagatatgtagactattgccatttgtttttttgttttggttttgctttgtgtctgaagctgaattgatttcttttttttgaatgtgaaagttgaatttcaaacgtagtcatttcttacagatggccaagacagaaaattgtggctaggttgactgagaactgttgtcttccatgtattaacacaattaagctttttatattccactctctgtgctgaccctggctgaggcattttgggagacaaggactctgaatcttctgcttccattaaagaagaactgtgatattcaacattggatttctgagaataaagataggatgattcctttgaactttgacttacttgtataaaatgtccagctaggttaggtttttgccatttcctatatactttgggtaaagctacatttgatgagcaatgtgaatgtttctgagaatgttcattcctgttttctcttaagagaatgtgctgtgtactaaatacaggccacatagtgtctgcctgttgaagatctggaaactgcctccccagatctgtattgtatttggtaggtaagggggtcagtttctttttctcattgtgtgttgataatctacacaccatctgttggaaccagggtgttattatggggaactcctcctgtgtactaggaggaggaccttagggagaccaagaggagagaagcatttcctttgatgaagtcacatcctgtctatgagcccactaatgctgtaacattggcctgaaagagagtgttctttaaaagcctttctcggctgttagtataaaaacatgatggtatcagctcttagcatgtttgcttgacccttatggaaggtataaatccacagaacttccttcccagagaactgggaaattgtcctagaaataaaccttgtacagttgagtggacatggataagcaacaatttgttactttgcaggatttgttccttggtaattgtttggtgtgtcatcctgtaaatattcatgatagtctgtttatatccttttgtatatcgttgatactggattgggtagaaaaataaattggcaatttaaaaaaaaaaaaaaaaaaaaaaaaatntctcgg

SEQ ID NO: 272 - DNA, 470 bp, Homo sapiens
  misc feature (395): n equals a,t,g, or c
  misc feature (404): n equals a,t,g, or c
  misc feature (425): n equals a,t,g, or c
  misc feature (429): n equals a,t,g, or c
aaacagcaagtgggaactcagcattcaagttaacttgtagagctacccagctgctaagagcagtgtgatctttggtgctcttaggatcactttggtatctgctcattttcctttttgtctaccctataaagcacaaaatcgagtgggtaaaaagtatgaaaccagcactgtttctactttcttagaggtctggtatctagtgagcaggctgaggcctcaggactagttcagtgttaaggatttcatgttgaaactcatttgtcctctgtgggttttttgacagtagagagtgacctaactcatttgattttgtttttccctcagttgactttccatcttcagttcgaatacatttaattgaccaaaatggcagacattgagtgagtacttcttgncccagtttnaattctttccttccttttttncccnggttgtgagttaattggttcaacttctgggttcagggtttt

SEQ ID NO: 273 - DNA, 983 bp, Homo sapiens
  misc feature (879): n equals a,t,g, or c
  misc feature (915): n equals a,t,g, or c
  misc feature (930): n equals a,t,g, or c
  misc feature (967): n equals a,t,g, or c
ccaagcggaagtgacgttagtgtccgccggagtgtcgttggtgtgttgcgcgactggccttgagggagagctggggcctgctcccggagagatacggctatgtcgatcgaaatcgaatcttcggatgtgatccgccttattatgcagtacttgaaggagaacagtttacatcgggcgttagcaccttgcaggaggagactactgtgtctctgaatactgtggacagcattgagagttttgtggctgacattaacagtggccattgggatactgtgttgcaggctatacagtctctgaaattgccagacaaaaccctcattgacctctatgaacaggttgttctggaattgatagagctccgtgaattgggtgctgccaggtcacttttgagacagactgatcccatgatcatgttaaaacaaacacagccagagcgatatattcatctggagaaccttttggccaggtcttactttgatcctcgtgaggcatacccagatggaagtagcaaagaaaagagaagagcagcaattgcccaggccttagctggcgaagtcagtgtggtgcctccatctcgtctcatggcattgctgggacaggcactgaagtggcagcagcatcagggattgcttcytcctggtatgaccatagatttgtttcgaggcaaggcagctgtcaaagatgtggaagaagaaaagtttcctacacaactgagcaggcatattaagtttggtcagaaatcacatgtggagtgtgctcgattttctccagatggtccagtatttggtcactgggtctgttgatggattcattgaagtatgggaactttactactggaaaaatcagaaaggatcttaagttaccaggcccaagattaantttatggatgatgggttgatgctgttcccctggcangtgttttcagccagnggttacagaaatgtttagccaacttggggccccaggntgggaaaattcaaggt

SEQ ID NO: 274 - DNA, 2006 bp, Homo sapiens
ctgaaaacccctctggtctcagagacagtaggggcagtgccactttctacaacctgccaacccacacactggagtaattctgaaaaaaattattcctaaactctctaagtgtggacggagaatgagcaagccccagaagtattttacaaccagagtgggtaatgaggagggggcttactggaatcgtcatatctctgaatattgaaaacaacaactaaaaaagtggaccttctcagaaaaaaagggcagcaaatgaccaagggcgccccttctggccgtgcttggcttgagtaactgtctctctttccccacccccatcacagggctttcagtttggcaaaggaaaagcagataaaaacagaacattccatatgtttctttctccatcggccaaaaacattttgacacaatgtttgtgaaacacctttggagaggtgcacttctgaatgctgcctctgccgtaaatcctgggggcaagggatcagcctcttcccaggaaccatcgccttctataaaccgtgaactcaagcaggcattttttttttcttaccgaaaggctgctattgtgcaagggcacataatgggtctgtttgctcttattggcttccaaatgtgcatggcaaagagagagatgtgggcctagagcagatatattcagcaaggtgacagyttcccataacaattctaacacttcttatcttatgtgagaataaaatatttaagggttgaaccttattttgccaaatgtatcttttctgcttttgaattgggcagaagattttagcaactatattctacaaatgttacttataacacacacacacacatctgaaatatatgccgaaaattgacgtctttgrcctcagggagagcacctgtccaggtctgcctaaaggaaatggctccagtgggtctaaacaaccacatcctatccatggataggtctagtcataacactttagagagaatgtcagagcaggagggaggcaagccgcctcttctcggccatcgactgcagatgatgaaagagcgggattcaactttgttttcttttcctgtggccccagtgaaacctcctgccctccctgcacgtctgtgtcttcatttctaaaatgggggtgatgctttcatattgacctcaccccatactacctcacagatgtgttgtgaggattaataaaattatgtctatggtattttcagtttctggagaaaaatacttatagacagtttaactattacatagatatataagtgatctcagtttcttgtttgctgtgatactaatgtgttgttttaacttattccataaaatgacagttgtgtcctagccacatcagacagctatctaagctctggactacccctttgtgcagctgaatcactgcagggttgaccatgcctggtgccacagccatggtttccatttctagatgaaaggatggcctaggacataggtctcaaagactcttggatcagaatcaggagattagggaaaacaggatggatacctgagcactaacagcagtagacgtagacctctgtcctttaccatctgaggtcttctggattctttgtggggttaattttgatttgatgtcatctgtttgcccttcatcttgcttgcaagtgtgcatggttcaatccctcacatccaggaaatgaattttgcaattgggccagatgctaatttgcacgttgattcaccttctttgcctttaagccttttttttcttttttttttttttggcaaatgaatgtaccatttcaactttgattttaatagtgctagttgatattggtaataatgctaaccaagagatcaatgccagatttttctcttggggtaagttagctgaagtcatttaaagatggaaaggtgggaaaattctttgatatttgatgtcattgtatccacatttgttgtaagacatattgcataccaattataattatatcaattaaagttgataaaagcttcaaaaaaaaaaaaaaaaaaaaaaaat

SEQ ID NO: 275 - DNA, 1376 bp, Homo sapiens
  misc feature (4): n equals a,t,g, or c
  misc feature (1368): n equals a,t,g, or c
aaanaacaaaagatccagatgttcgattgggcctcaatcagcattacccaagctttaaaccacctccatttcagtaccatcaccgtaamcccatgggattggtgtgacagccacaaatttcactacacacaatattccacagactttcactaccgccattcgctgcacaaagtgtggaaaaggtgtcgacaatatgccggagttgcacaaacatatcctggcttgtgcttctgcaagtgacaagaagaggtacacgcctaagaaaaacccagtaccattaaaacaaactgtgcaacccaaaaatggcgtggtggttttagataactctgggaaaaatgccttccgacgaatgggacagcccaaaaggcttaactttagtgttgagctcagcaaaatgtcgtcgaataagctcaaattaaatgcattgaagaaaaaaaatcagctagtacagaaagcaattcttcagaaaaacaaatctgcaaagcagaaggccgacttgaaaaatgcttgtgagtcatcctctcacatctgcccttactgtaatcgagagttcacttacattggaagcctgaataaacacgccgccttcagctgtcccaaaaaacccctttctcctcccaaaaaaaaagtttctcattcatctaagaaaggtggacactcatcacctgcaagtagtgacaaaaacagtaacagcaaccaccgcagacggacagcggatgcggagattaaaatgcaaagcatgcagactccgttgggcaagaccagagcccgcagctcaggccccacccaagtcccacttccctcctcatccttcaggtccaagcagaacgtcaagtttgcagcttcggtgaaatccaaaaaaccaagctcctcctctttaaggaactccagcccgataagaatggccaaaataactcatgttgaggggaaaaaacctaaagctgtggccaagaatcattctgctcagctttccagcaaaacatcacggagcctgcacgtgagggtacagaaaagcaaagctgttttacaaagcaaatccaccttggcgagtaagaaaagaacagaccggttcaatataaaatctagagagcggagtggggggccagtcacccggagccttcagctggcagctgctgctgacttgagtgagaacaagagagaggacggcagcgcaagcaggagctgaaggacttcagctacagcctccgcttggcktcccgatgctctccaccagcggccccgtacatcaccagggagtataggaaggtcaaagctccagctkgcagcccagtttcaggggaccatttttcaaagggtagacactctgggcttgcttcccttgacagcaccttgaagttgacctgggantcagttga

SEQ ID NO: 276 - DNA, 2594 bp, Homo sapiens
  misc feature (2198): n equals a,t,g, or c
gcccacgcgtccgcccacgcggccacgccgcgccggctctgggcactcagcatcgtttccttttcctccgctggagcagctatggcggcggtgaagaccctgaaccccaaggccgaggtggcccgagcgcaggcggcgctggcggtcaacatcagcgcagcgcggggtctgcaggacgtgctaaggaccaacctggggcccaagggcaccatgaagatgctcgtttctggcgctggagacatcaaacttactaaagacggcaatgtgctgcttcacgaaatgcaaattcaacacccaacagcttccttaatagcaaaggtagcaacagcccaggatgatataactggtgatggtacgacttctaatgtcctaatcattggagagctgctgaaacaggcggatctctacatttctgaaggccttcatcctagaataatcactgaaggatttgaagctgcaaaggaaaaggcccttcagtttttggaagaagtcaaagtaagcagagagatggacagggaaacacttatagatgtggccagaacatctcttcgtactaaagttcatgctgaacttgcagatgtcttaacagaggctgtagtggactccattttggccattaaaaagcaagatgaacctattgatctcttcatgattgagatcatggagatgaaacataaatctgaaactgatacaagcttaatcagagggcttgttttggaccacggagcacggcatcctgatatgaagaaaagggtggaggatgcatacatcctcacttgtaacgtgtcattagagtatgagaaaacagaagtgaattctggctttttttacaagagtgcagaagagagagaaaaactcgtgaaagctgaaagaaaattcattgaagatagggttaaaaaaataatagaactgaaaaggaaagtctgtggcgattcagataaaggatttgttgttattaatcaaaagggaattgaccccttttccttagatgctctttcaaaagaaggcatagtcgctctgcgcagagctaaaaggagaaatatggagaggctgactcttgcttgtggtggggtagccctgaattcttttgacgacctaagtcctgactgcttgggacatgcaggacttgtatatgagtatacattgggagaagagaagtttacctttattgagaaatgtaacaaccctcgttctgtcacattattgatcaaaggaccaaataagcacacactcactcagatcaaagatgcagtgagggacggcttgagggctgtcaaaaatgctattgatgatggctgtgtggttccaggtgctggtgccgtggaagtggcaatggcagaagccctgattaaacataagcccagtgtaaagggcagggcacagcttggagtccaagcatttgctgatgcattgctcattattcccaaggttcttgctcagaactctggttttgaccttcaggaaacattagttaaaattcaagcagaacattcagaatcaggtcagcttgtgggtgtggacctgaacacaggtgagccaatggtggcagcagaagtaggcgtatgggataactattgtgtaaagaaacagcttcttcactcctgcactgtgattgccaccaacattctcttggttgatgagatcatgcgagctggaatgtcttctctgaaaggttgaattgaagcttcctctgtatctgaatcttgaagactgcaaagtgatcctgaggattacagctgtggaatttttgtccaagcttcaaataattttgaaagaaattttcccatatgaaaaaaggagagaacactggcatctgttgaaatttggaagttctgaaattatagtatttttaaaaattgcactgaagtgtatacacataaagcaggtcttttatccagtgaacaggatgttttgctttagcagcagtgacataaaattccatgttagataagcatatgttacttaccttgttattaaatatttcttgaaaagcaaattttaatggtttaattttatgtggacgtatgttaaattatccaactaccctattgttaagcatttggttttaaaatttttatgctaatataaatgctcaagtaatttaaaatattgaaagcatccctgttggtataaatttctgagtaaatgcattggatcagttggactttgaacgcctttgaaatggctttgctaaaatnctcccgccacaaagttgtaggaaatgggaagaggagtcaactagaggcaagggagttgagagagctgcaactgtaaagggcaagaacaggcagaggtaaaaagatgatggaaggtgtggtgactaagggccacggttattgggtgaaatttgagattgtaggccaactgtattttcaagcttctgaacttaggcaaaatattcatcgcaaagtctctagcgtcatatttttctcacccaaattacgtttccacgagattatttatatatagttggtctatctctgcagtccttgaaggtgaagttgtgtgttactaggctgtgttttgggatgtcagcagtggcctgaagtgagttgtgcaataaatgttaagttgaaacctcaaaaaaaaaaaaa

SEQ ID NO: 277 - DNA, 679 bp, Homo sapiens
  misc feature (438): n equals a,t,g, or c
  misc feature (617): n equals a,t,g, or c
  misc feature (653): n equals a,t,g, or c
gctcaaggtgctgtggtgcttcctgatccatgtgcagggcagtatccgccagttcgccgcctgccttgtgctcaccgacttcggcatcgcagtcttcgagatcccgcaccaggagtctcggggcagcagccagcacatcctctcctccctgcgctttgtcttttgcttcccgcatggcgacctcaccgagtttggcttcctcatgccggagctgtgtctggtgctcaaggtacggcacagtgagaacacgctcttcattatctcggacgccgccaacctgcacgagttccacgsggacctgcgctcatgctttgcaccccagcacatggccatgctgtgtagccccatcctctacggcagccacaccagcctgcaggagttcctgcgccagctgctcaccttctacaaggtggctggcggctgccaggagcgcascangggctgcttccccgtctacctggtctacagtgacaagcgcatggtgcagacggccgccggggactactcaggcaacatcgagtggccagctgcacactctgttcagccgtgcggcgytcctgctgcgcgccctctgargccgtcaagtccgccgccawcccctactggctgttgctcangccccagcactcaaagtmatcaaagccgacttcaancccatgcccaaaccgtggaaccaaaa

SEQ ID NO: 278 - DNA, 1478 bp, Homo sapiens
ggcagagggccggccgcagcgctgagggagccggtgccatctgtgggggctttgggccaggggtctccggacagcatgagcgtgggcttcatcggcgctggccagctggcttttgccctggccaagggcttgcacagcagcaggcgtcttggctgcccacaagataatggctagctccccagacatggacctggccacagtttctgctctcaggaagatgggggtgaagttgacaccccacaacaaggagacggtgcagcacagtgatgtgytcttcctggctgtgaagcacacatcatccccttcatcctggatgaaataggcgccgacattgaggacagacacattgtggtgtcctgcgcggccggcgtcaccatcagctccattgagaagaagctgtcagcgtttcggccagcccccagggtcatccgctgcatgaccaacactccagtcgtggtgcgggagggggccaccgtgtatgccacaggcacgcacgcccaggtggaggacgggaggctcatggagcagctgctgagcagcgtgggcttctgcacggaggtggaagaggacctgattgatgccgtcacggggctcagtggcagcggccccgcctacgcattcacagccctggatgccctggctgatgggggtgtgaagatgggacttccaaggcgcctggcagtccgcctcggggcccaggccctcctgggggctgccaagatgctgctgcactcagaacagcacccaggccagctcaaggacaacgtcagctctcctggtggggccaccatccatgccttgcatgtgctggagagtgggggcttccgctccctgctcatcaacgctgtggaggcctcctgcatccgcacacgggagctgcagtccatggctgaccaggagcaggtgtcaccagccgccatcaagaagaccatcctggacaaggtgaagctggactcccctgcaggraccgctctgtcgccttctggccacaccaagctgctcccccgcagcctggccccagcgggcaaggattgacacgtcctgcctgaccaccatcctgcaccaccttctcttctcttgtcactagggggactagggggtccccaaagtggcccactttctgtggctctgatcagcgcaggggccagccagggacatagccagggaggggccacatcacttcccactggaaatctctgtggtctgcaagtgcttcccagcccagaacaggggtggattccccaamctcaacctcctttcttctctgctccctttcagttttataagttggtttccagcccccagtgtcctgacttctgtctgccacatgaggagggaggccctgcctgtgtgggagggtggttactgtgggtggaatagtggaggccttcaactgattagacaaggcccgcccacatcttggagggcatctgccttactgattaaaatgtcaatgtaatctaaaaaaaaaaacaaaa

SEQ ID NO: 279 - DNA, 2321 bp, Homo sapiens
  misc feature (474): n equals a,t,g, or c
  misc feature (483): n equals a,t,g, or c
ggcacaggtccgagcgccgccatggctctgctgtccgagggcctggacgagstgcccgccgcctgcctgtcgccgtgcgggccgcccaacccgaccgagctgttcagcagtcacggcgcctggctctggaggactggtggcgggcggccccgaagccttcgcggccttcctgcgacgcgagcgcctggctcgtttcctgaaccccgatgargtgcacgccattctgcgcgcggcggagaggccgggagargarggcgcggcggcggcggcggcggccaggactcgttcggctcctcgcacgactgctcttcgggcactacttccccgagcagtcggacctggagccamcgctgttggagcttggctggcccgccttctamcagggcgcctamcgcggcgccamgcgtgtcgagacgcacttccagccccgcggcgctggcgaaggtggcccctacggctgcaaggacgctctgngccacactnccgctcggcgcgagaggtgattgcagtggtcatggacgtgttcacagacatcgacatcttcagagacctgcaagaaatatgcaggaaacagggagttgctgtgtatatccttctggaccaggctctcctctctcaatttytggatatgtgcatggwtctgaaakttcatcctgaacaggaaaagttaatgacagttcggactatcacaggaaatatctactatgcaaggtcaggaactaagattattgggaaggttcacgaaaagttcacgttgattgatggcatccgcgtggcaacaggctcctacagttttacatggacggatggcaaattaaacagcagtaacttggtaattctgtctggccaagtggttgaacactttgatctggagttccgaatcctgtatgcccagtccaagcccatcagccccaaactcctgtctcacttccagagcagcaacaagtttgatcacctcaccaaccgaaaaccacagtccaaggagctcaccctgggcaacctgctgcggatgcggctggctaggctgtcaagtactcccaggaaggcggacctggacccagagatgcccgcagagggcaaggcagagcgcaagccccatgactgtgagtcctctactgttagtgaggaagactacttcagcagccacagggacgagctccagagcagaaaggccattgacgctgccactcaaacagagccaggagaggagatgccagggctgagtgtgagtgaggtgggaacacaaaccagcatcaccacagcatgtgctggtacccagactgcagtcatcaccaggatagcaagctctcaaaccacgatttggtccagatcgaccactactcagactgacatggatgagaacattctctttcctcgaggaactcaatctacagaagggtcaccagtctcaaaaatgtctgtatcgagatcttccagtttgaagtcttcctcctctgtgtcttcccaaggctctgtggcaagctccactggttctcccgcttccatcagaaccactgacttccacaatcctggctatcccaagtacctgggcaccccccacctggaactgtacttgagtgactcacttagaaacttgaacaaagagcggcaattccacttcgctggtatcaggtcccggctcaaccacatgctggctatgctgtcaaggagaacactctttactgaaaaccaccttggccttcattctggcaatttcagcagagttaatttgcttgctgttagagatgtagcactttatccttcctatcagtaactgctccgtgttcagactcctggtttcttccaggcttacagtggacatcatcagcttcctgctttaaaaaatatcttatgtccctaattgcctttcttttacctgactttgtcacctttgttgtctttgaattctttaggctgcatattattttacatgctttgttttgtcatgtatataccaggtattggttttatggtttaaacactatggatacaggggtttgttttgcacaattttaatagtcatgcactacataatgatgttttggtcratgacagaccacgtatatgttggcagtctcataagattataatactgtatttttactataccttttctrtgtttagatacaaataccattatgttacagttgcctacagtattcagtgcagtaacatgatgtacaggtttgtagcctgttttgcatttttcttaggttgtatgctcttctgttttaaaggtttgaatcaccagcatttttgtgatcaaaatcctatttagaaaaaataaaactactttctgtttatctctttagaaaaaaaaa

SEQ ID NO: 280 - DNA, 1693 bp, Homo sapiens
  misc feature (200): n equals a,t,g, or c
ggcacagtgtggagcggttgtggggcggcactgcggaactgcgcgattgtggttcccgccgtatttcccgttccccatctagtaactcccatctcagcccacgtatctccctgagtggaaatctcgggccccagaccagtcgattgggaggtccgccctccccttcagcgacttggtctgtgttttggcagttgccgcgnacaacagtcacttccgggaaggggctctgcgaatctccttccgtcggtccgctcagaatcagctgtcctctcagactgtgtgggtggtttccccggccgcagctccgtacgggcttggattgctgggcctcggtgcaccccagcctcccccactcgggttctgagcttgagctggcggctctttaactctgcttcactgttgctcttggcaacatccacttccgggagcgagtgccgtttcccccgctcaccgcgggctagggagcgtgggattccggactgtgagcggctgttagtgcgtcgcagctgctggcgatccggcgaccctcggccggcaggacccgcgggccacgcagccggggccttctcaacgcctcagtacctcggcgggaccgccatggttctgctgcacgtgaagcggggcgacgagagccagttcctgctgcaggcgcctgggagtaccgagctggaggagctcacggtgcaggtggcccgggtctataatgggcggctcaaggtgcagcgcctctgctcagaaatggaagaattagccgaacatggcatatttctccctcctaatatgcaaggactgaccgatgatcagattgaagaattgaaattgaaggatgaatggggtgaaaaatgcgtacccagcggaggtgcagtgtttaaaaaggatgatattggacgaaggaatgggcaagctccaaatgagaagatgaagcaagtgttaaagaagactatagaagaagccaaagcaataatatctaagaaacaagtggaagccggtgtctgtgttaccatggagatggtgaaagatgccttggaccagcttcgaggcgcggtgatgattgtttaccccatggggttgccaccgtatgatcccatccgcatggagtttgaaaataaggaagacttgtcgggaacacaggcagggctcaacgtcattaaagaggcagaggcgcagctgtggtgggcagccaaggagctgagaagaacgaagaagctttcagactacgtggggaagaatgaaaaaaccaaaattatcgccaagattcagcaaaggggacagggagctccagcccgagagcctattattagcagtgaggagcagaagcagctgatgctgtactatcacagaagacaagaggagctcaagagattggaagaaaatgatgatgatgcctatttaaactcaccatgggcggataacactgctttgaaaagacattttcatggagtgaaagacataaagtggagaccaagatgaagttcaccagctgatgacacttccaaagagattagctcacctttctcctaggcaattataatttaaaaaaaaaaaaaaggccacttactgccctctgtaaaagatgttaacatttctagttttcttttagtgtgaatttttaaaatagcagttattcaaggttttagaacttaataaatacctagtcagaaaaaaatgtgtaaatcgtttttgtttcaggact

SEQ ID NO: 281 - DNA, 258 bp, Homo sapiens
  misc feature (42): n equals a,t,g, or c
  misc feature (64): n equals a,t,g, or c
ggcagagccaggactcagtaatccctggggggcaggctctgnagccctcggccacacgtggctnccggcacccatggtcccagtgccttggaatggagacggccagttctggggccagatgtggtgctctggaatccagtcccatttccttcctggccacgagctgtcccagcggcctcttcagccgcattcagcccctacttacctggggaccccggctggggcacgagaagcaccaggggggttagggcccaaagg

SEQ ID NO: 282 - DNA, 1764 bp, Homo sapiens
  misc feature (1764): n equals a,t,g, or c
gctgtgtcctggagctttatttggggagtttyayccagaatggtgggagaaacctcccaggtgccaggtaccccgcatcgtgacccttcacttggtgtcttaggaagtcaagctgagggatgctgagtcctcccctgctggcccctgcagccccagccctgcttttcatcccccacccctgcaaacatggaggagccccctccttctcacctcggtctcctagcccctgacatggagaascctgagacaagccacagaacccctcttttctaaaatggagacaataatttcctacctcccaagggagcagagaggcctcgtggcacgtccgtggccagggagcccactgtcctggctggcggcgggatcgtgcrctcctctgtctcccggatgagaagccccgtttccatggtcttgacccttcctttctcccggctgtcagaactgggtctcttgattttgcccctacattatgcctctgtgggaaaaaaaaaaaaatcagaccaagaaatgagcctgaaattcagtgtttaccatggctcaaggatgcccatctggtgtccagttgccttttgtattcaaatgaaaatgctttgtacaactgaggagttacagtgaagtgttaaccaggggtccagggagcgagttgaaaagatggagtgagtgtatttgcagccagggagctgcagggtggatttgaggggccataccctctgagcacttaaaaaaggtatttgctccaggccaggcagcaggctgtggacacccttgccaccactggggactgccactgaggactccccgagcacgttgttccccgtcttctccaaggtgttgaggtgagctggggttggccccggcccaggcttctgtcccaaggagaagctgccactgacagtcatcctaccgcactgctaaagagaatgttcgcagtggtgggcggcgtgcctgtgccaacccttccagggacccggccatgggggaccttggcccaaggatgcctggggcctgccagctgtgctgcaaargtggggggcccacaccctaaaactaacccaggccccagaccactggaggccagggcttccctgcacgggctaaggggagttgggatatcaccccaaagtgaccttgccagtgagctgttcagcaggtagccactgccctgccatctgtgcagagccagccaccttgggggctggggttcccgctttgaggcccaccttccatactccccttgactcggctctggctgaactggggaactctcttgtggtcagcaaagcccctgccatgcaggccaggtgccattgagaattaagtgctcagagggccaggagcccaggggatgggaaagtgtgtggttttagtacgttcaaaagggacaatcgcttgcagttggtagatctagcgatctagttgggagataatggtgtttaccccatatgaagtattcaatagttctacttgtgaatttgtatttattttgagttatacttgacacagaattccttttttaaaaaaatatgtgtgtattttggaaaaaaaattcatagatgttaaaatttctgcatggttaccagtttttctcacaacactgaatttggtagcttttcccgaaaaaatcttcacagtaattttttgtctgtatatatttgagggcctttttttaaaaaaaaaaaaaraaaagaaaaatataatkgtttgatttttgagattwaaacaaacmaaaagagaggcattttcmaaatttcagaactttcn

SEQ ID NO: 283 - DNA, 799 bp, Homo sapiens
  misc feature (750): n equals a,t,g, or c
  misc feature (760): n equals a,t,g, or c
  misc feature (769): n equals a,t,g, or c
aattcggcacgagtcagaggccgagtccgtcactggaagccgagaggagaggacagctggttgtgggagagttcccccgcctcagactcctggttttttccaggagacacactgagctgagactcacttttctcttcctgaatttgaaccaccgtttccatcgtctcgtagtccgacgcctggggcgatggatccgtttacggagaaactgctggagcgaacccgtgccaggcgagagaatcttcagagaaaaatggctgagaggcccacagcagctccaaggtctatgactcatgctaagcgagctagacagccactttcagaagcaagtaaccagcagcccctctctggtggtgaagagaaatcttgtacaaaaccatcgccatcaaaaaaacgctgttctgacaacactgaagtagaagtttctaacttggaaaataaacaaccagttgagtcgacatctgcaaaatcttgttctccaagtcctgtgtctcctcaggtgcagccacaagcagcagataccatcagtgattctgttgctgtcccggcatcactgctgggcatgaggagagggctgaactcaagattggaagcaactgcagcctyctcagttaaaacacgtatgcaaaaacttgcagagcaacggcgccgttgggataatgatgatatgacagatgacattcctgaaagctcactcttctcaccaatgccatcagaggaaaaggytgctttcccttcccagacctctgnttttcaaaangccttcggnaacttccagttggccaaaaaaggggcccgt

SEQ ID NO: 284 - DNA, 1489 bp, Homo sapiens
aggtagactgtggcaatraggcagctaagtggttcaccaacttcttgaaaactgaagcgtatagattggttcaatttragacaaacatgaagggaagaacatcaagaaaacttctccccactcttgatcagaatttccaggtggcctacccagactactgcccgctcctgatcatgacagatgcctccctggtagatttgaataccaggatggagaagaaaatgaaaatggagaatttcaggccaaatattgtggtgaccggctgtgatgcttttgaggaggatacctgggatgaactcctaattggtagtgtagaagtgaaaaaggtaatggcatgccccaggtgtattttgacaacggtggacccagacactggagtcatagacaggaaacagccactggacaccctgaagagctaccgcctgtktgatccttctgagagggaattgtacaagttgtctccactttttgggatctattattcagtggaaaaaattggaagcctgagagttggtgaccctgtgtatcggatggtgtagtgatgagtgatggatccactagggtgatatggcttcagcaaccaggagggattgactgagatcttaacaacagcagcaacgatacatcagcaaatccttattatccagccttcaactatctttaccctggaaaacaatctcgatttttgacttttcaaagttgtgtatgctccaggttaatgcaaggaaagtattagaggggggaatatgaaagtatatatataaattttaggtactgaaggctttaaaaataattaagatcatcaaaaatgctattttgaatgttatcatggctattacacttttacttcctgactttaatattgatgaataaagcaagtttaatgratcaactaaaaagctgcaaaaatgtttttaaaatgtgtgccttttattacctatcagtctatgttttgggagaaatgggaagcaacagatcactgtgtcctsatgtgcaggacgcatgttaccacactcacaaatgcctaatattggtctttatgtggccattgagtcctgttgactttccactcatgtgctttttactctagcattatggaatctgggctgtacttgagtatggaaattctcttatagacttagttttagtactctattacacctttactaagccacataaaagtaatctgtttgtgtgtaactgccagatataccacctggaattccaagtaagataaggaagaggatgacatttaaaagagaatggaattttgagagtaggaatgcaaggaagacagcatgaacatatttttttcagtgcaaataattttttcgtaacaaagaaacgaacaactttggtatgatcttaagcaaaaatactcactgaaatagtatgtggatgaattcacctacttacaattttatggtttctttgtaaataataaatgtgaatctcaattttstaaaaaaaaaaaaaaaaaaaaagttct

SEQ ID NO: 285 - DNA, 702 bp, Homo sapiens
  misc feature (695): n equals a,t,g, or c
ggcagaggctcccaaaatggtgggattacaggtgtgtgggccaccgtgcctggctgattcagcattttttatcaggcaggaccaggtggcacttccacctccagcctctggtcctaccaatggattcatggagtagcctggactgtttcatagttttctaaatgtacaaattcttataggctagacttagattcattaactcaaattcaatgcttctatcagactcagttttttgtaactaatagatttttttttccacttttgttctactccttccctaatagctttttaaaaaaatctccccagtagagaaacatttggaaaagacagaaaactaaaaaggaagaaaaaagatccctattagatacacttcttaaatacaatcacattaacattttgagctatttccttccagcctttttagggcagattttggttggtttttacatagttgagattgtactgttcatacagttttataccctttttcatttaactttataacttaaatattgctctatgttagtataagcttttcacaaacattagtatagtctcccttttataattaatgtttgtgggtatttcttggcatgcatctttaattccttatcctagcctttgggcacaattccygtgcttcaaaatgagagtgacggctgggcatggtgggctcccgcctgtaaatcccagtnacttggg

SEQ ID NO: 286 - DNA, 1175 bp, Homo sapiens
  misc feature (1153): n equals a,t,g, or c
  misc feature (1166): n equals a,t,g, or c
ctaaagggaacaaaagctggagctccaccgcggtggcggccgctctagaactagtggatcccccgggctgcaggaatgttactatttctacatgttgtccatgatgtgactttcgtaaaccttcaaaattatttgggcatagtgctctatgtttaataaaggtttttatagatgttttattccatatgtcttcacaagtcaggacccacaattacccgtgttttgtttgaacagcagtgtcccatctggcttcgacccaacaaagttcattaacctgggatgaatggggttggcctgttggtgatttggatgctgttctgtgatctaaaacaactcttattgaattgtatttactccctaaacaacacttgacaggctgttgcacagggcttctatagatcagtgtgttaggaatgggaggccccttcctgcctgccttcccatattggtcccttgacattgacaaaagcacagtgactgtcagcagattcctttacttttgtttgtgggaggtaggaattgttttaatgcattttaaacagtgtttctgaaattggatggctggctaatagacactgaatcacccggagtgcttatcttaaaattgcagatttagggagcctgccaatttaacagtctcatcaggtgattcttttcaacagtaatgtttgagaattactgggttaaattgtgggaaagggtccagattttaaaggtgctttaaggttgccctctgccgatactgtttgtctttctactgtttcatcccctaacttcccccaaccctcaaattaaaactagaactatagatccacatgaacgcacgcctgagatttggccactcacctatgttttgggtggattgcctaggaaagcaagtcatatggccattgatagttctcatgtaattagttttgctcaccactagtacagatgacccgtttacacgtggcttccctcggaagccctcctcaacagtagctggtgtgaaagactaaatcagtagagttggaaaagctttataaccggtgtgtcatatgcttgctatttaaagctgtgtgttggttttgtttttctgccacattcactagttttttaataaatattttccaaaaatggaaaaaaaaaaaaaaaaaaaaaaaaaaaaaaaaanccccggggggggncccgggccc

SEQ ID NO: 287 - DNA, 2873 bp, Homo sapiens
  misc feature (829): n equals a,t,g, or c
  misc feature (2870): n equals a,t,g, or c
  misc feature (2871): n equals a,t,g, or c
ggcgcggcggcggtagcagccaggcttggcccccggcgtggagcagacgcggacccctccttcctggcggcggcggcgcgggctcagagcccggcaacsggcgggcgggcagaatgagtctgcaggtcttaaacgacaaaaatgtcagcaatgaaaaaaatacagaaaattgcgacttcctgttttcgccaccagaagttaccggaagatcgtctgttcttcgtgtgtcacagaaagaaaatgtgccacccaagaacctggccaaagctatgaaggtgacttttcagacacctctgcgggatccacagacgcacaggattctaagtcctagcatggccagcaaacttgaggctcctttcactcaggatgacacccttggactggaaaactcacacccggtctggacacagaaagagaaccaacagctcatcaaggaagtggatgccaaaactactcatggaattctacagaaaccagtggaggctgacaccgacctcctgggggatgcaagcccagcctttgggagtggcagctccagcgagtctggcccaggtgccctggctgacctggactgctcaagctcttcccagagcccaggaagttctgagaaccaaatggtgtctccaggaaaagtgtctggcagccctgagcaagccgtggaggaaaaccttagttcctattccttagacagaagagtgacacccgcctctgagaccctagaagacccttgcaggacagagtcccagcacaaagcggagaytccgcacggagccgaggaagaatgcaaagcggagactccgcacggagccgaggaggaatgccggcacgntggggtctgtgctcccgcagcagtggccacttcgcctcctggtgcaatccctaaggaagcctgcggaggagcacccctgcagggtctgcctggcgaacctgggctgccctgcgggtgtgggcacccccgtgccagcagatggcactcagacccttacctgtgcacacacctctgctcctgagagcacagccccaaccaaccacctggtggctggcagggccatgaccctgagtcctcaggaagaagtggctgcaggccaaatggccagctcctcgaggagcggacctgtaaaactagaatttgatgtatctgatggcgccaccagcaaaagggcacccccaccaaggagactgggagagaggtccggcctcaagcctcccttgaggaaagcagcagtgaggcagcaaaaggccccgcagaggtggaggaggacgacggtaggagcggagaggagaggacccccccatgccagcttctcggggctcttaccacctcgactgggacaaaatggatgacccaaacttcatcccgttcggaggtgacaccaagtctggttgcagtgaggcccagcccccagaaagccctgagaccaggctgggccagccagcgctgaacagttgcatgctgggcctgccacggaggagccaggtccctgtctgagccagcagctgcattcagcctcagcggaggacacgcctgtggtgcagttggcagccgagaccccaacagcagagagcaaggagagagccttgaactctgccagcacctcgcttcccacaagctgtccaggcagtgagccagtgcccacccatcagcaggggcagcctgccttggagctgaaagaggagagcttcagagaccccgctgaggttctaggcacgggcgcggaggtggattacctggagcagtttggaacttcctcgtttaaggagtcggccttgaggaagcagtccttatacctcaagttygaccccctcctgagggacagtcctggtagaccagtgcccgtggccaccgagaccagcagcatgcacggtgcaaatgagactccctcaggacgtccgcgggaagccaagcttgtggagttcgatttcttgggagcactggacattcctgtgccaggcccacccccaggtgttcccgcgcctgggggcccacccctgtccaccggrcctatagtggacctgctccagtacagccagaaggacctggatgcagtggtaaaggcgacacaggaggagaaccgggagctgaggagcaggtgtgaggagctccacgggaagaacctggaactggggaagatcatggacaggttcgaagaggttgtgtaccaggccatggaggaagttcagaagcagaaggaactttccaaagctgaaatccagaaagttctaaaagaaaaagaccaacttaccacagatctgaactccatggagaagtccttctccgacctcttcaagcgttttgagaaacagaaagaggtgatcgagggctaccgcaagaacgargagtcactgaagaagtgcgtggaggattacctggcaaggatcacccaggagggccagaggtaccaagccctgaaggcccacgcggaggagaagctgcagctggcaaacgaggagatcgcccaggtccggagcaaggcccaggcggaagcgttggccctccaggccagcctgaggaaggagcagatgcgcatccagtcgctggagaagacagtggagcagaagactaaagagaacgaggagctgaccaggatctgcgacgacctcatctccaagatggagaagatctgacctccacggagccgctgtccccgcccccctgctcccgtctgtctgtcctgtctgattctcttaggtgtcatgttcttttttctgtcttgtcttcaactttttttaaaactagattgctttgaaaacatgactcaataaaagtttcctttcaatttaaaaaaaaaaaaaaaaaaaaaaaaaaaaaaaaaaaaaaaaaaaaaaaaaaaaaaaaaaaaaaaaaaaaaaaaaaaaaaaaaaaaaaaaanngg

SEQ ID NO: 288 - DNA, 2104 bp, Homo sapiens
  misc feature (44): n equals a,t,g, or c
  misc feature (497): n equals a,t,g, or c
  misc feature (1323): n equals a,t,g, or c
cggcgatctcagcaaatacttcttgagggcctactctgcgccangtgttggggttagaaaggagctggtcgctgtcggctaagcaagattggagctactcgtcgtccacctccagctcgcgtaagggtggctgtgcgactgcggccatttgtggatggaacagcgggagcaagtgatcccccctgtgtgcggggcatggacagctgctctctagagattgctaactggaggaaccaccaggagactctcaaataccagtttgatgccttctatggggagargagtactcagcaggacatctatgcaggttcagtgcagcccatcctaaggcacttgctggaagggcagaatgccagtgtgcttgcctatggacccacaggagctgggaagacgcacacaatgctgggcagcccagagcaacctggggtgatcccgcgggctctcatggacctcctgcagctcacaagggaggagggtgccgagggccggccatgggncctttctgtcaccatgtcttacctagagatctaccaggagaaggtattagacctcctggaccctgcttcgggagacctggtaatccgagaagactgccgggggaatatcctgattccgggtctctcccagaagcccatcagtagctttgctgattttgagcggcacttcctgccagccagtcgaaatcggactgtaggagccacccggctcaaccagcgctcctcccgcagtcatgctgtgctcctggtcaaggtggaccagcgggaacgtttggccccatttcgccagcgagagggaaaactctacctgattgacttggctgggtcagaggacaaccggcgcacaggcaacaagggccttcggctaaaagagagtggagccatcaacacctccctgtttgtcctgggcaaagtggtagatgcgctgaatcagggcctccctcgtgtaccttatcgggacagcaagctcactcgcctattgcaggactctctgggtggctcagcccacagtatccttattgccaacattgcccctgagagacgcttctacctagacacagtctccgcactcaactttgctgccaggtccaaggaggtgatcaatcggccttttaccaatgagagcctgcagcctcatgccttgggacctgttaagctgtctcagaaagaattgcttggtccaccagaggcaaagagagcccgaggccctgaggaagaggagatygggagccctgagcccatggcagctccagcctctgcctcccagaaactcagccccctacagaagctaagcagcatggacccggccatgctggagcgcctcctncagcttggaccgtctgcttgcctcccaggggagccarggggcccctctgttgagtaccccaaagcgagagcggatggtgctaatgaagacagtagaagagaaggacctagagattgaraggcttaaracgargcamaaagaactggaggccaagatgttggcccagaaggctgaggaaaaggagaaccattgtcccacaatgctccggcccctttcacatcgcacagtcacaggggcaaagcccctgaaaaaggctgtggtgatgcccctacagctaattcaggagcaggcagcatccccaaatgccgagatccacatcctgaagaataaaggccggaagagaaagctggagtccctggatgccctagagcctgaggagaaggctgaggactgctgggagctacagatcagcccggagctactggctcatgggcgccaaaaaatactggatctgctgaacgaaggctcagcccgagatctccgcagtcttcagcgcattggcccgaagaaggcccagctaatcgtgggctggcgggagctccacggccccttcagccaggtggaggacctggaacgcgtggagggcataacggggaaacagatggagtccttcctgaaggcaaacatcctgggtctcgccgccggccagcgctgtggcgcctcctgaccgtcgtctcctcactccgccttttcaaatttttgtataaccccgtgttgtgtaaatacagtttttgctccggtaaaaaaaaaaaaaaaaaaaaaaaaaaaaaaaaaaaaaaaa

SEQ ID NO: 289 - DNA, 1251 bp, Homo sapiens
  misc feature (1194): n equals a,t,g, or c
  misc feature (1211): n equals a,t,g, or c
  misc feature (1215): n equals a,t,g, or c
  misc feature (1231): n equals a,t,g, or c
ggcacgaggccggcttgctttcccctgcggtcgtccagactattgggckctagcgagacgaactattggtacggggctagagaggaaggctttgggattgccggggagcagcgagcgaccgacttccgtttccagttaccaaggcacgaggatccggtgttccaacccagggggaaaaatgcggcctttgactgaagaggagacccgtgtcatgtttgagaagatagcgaaatacattggggagaatcttcaactgctggtggaccggcccgatggcacctactgtttccgtctgcacaacgaccgggtgtactatgtgagtgagaagattatgaagctggccgccaatatttccggggacaagctggtgtcgctggggacctgctttggaaaattcactaaaacccacaagtttcggttgcacgtcacagctctggattaccttgcaccttatgccaagtataaagtttggataaagcctggtgcagagcagtccttcctgtatgggaaccatgtgttgaaatctggtctgggtcgaatcactgaaaatacttctcagtaccagggcgtggtggtgtactccatggcagacatccctttgggttttggggtggcagccaaatctacacaagactgcagaaaagtagaccccatggcgattgtggtatttcatcaagcagacattggggaatatgtgcggcatgaagagacgttgacttaaaacgaagccattccaaggacagacggctgtatggaaaggccgagctttgtttcctgtgtttgtgtggactccaccatcatgttgaattttgtcaacactctggcctcttcagggacttcttatttactgtactctctatcactgacaaatgcaggctggattcttattatatacagagatggctcaaaaatggggtttcagatctttgtgacgaaatagaatactgtttcatatttgaatcagagggcttcttgttctgagaaataggttcaaaatcattggaaccaggaacaagaatagcttattgttatctgtgataacactgttttctaaacacaaggattttcttttttattaatatgcaacatagacattgccataacagaataataaaccacatgtggggttttaaaaatgaaatttggctaataggagcaattcastatttttctatacagtaattggtgtgtggnatagargaaaacgggtncaancccctttgcactacantwttttgcctgatgagccat

SEQ ID NO: 290 - DNA, 1591 bp, Homo sapiens
  misc feature (768): n equals a,t,g, or c
  misc feature (1538): n equals a,t,g, or c
  misc feature (1560): n equals a,t,g, or c
  misc feature (1562): n equals a,t,g, or c
  misc feature (1568): n equals a,t,g, or c
gtattttgcgatgttaaaggaaattatgtcgtgatgacgttatttggtgtggatggtaagcggatggaaaaatcaatcaaaccaccacaaagtggttatttatgtgtcgtgagtgatgtcttgtttacattatgttctagactggccccctgaatctccagacaaccaatatcacttaaataagtgatagtcttaatactagtttttagactagtcattggagaacagatgattgatgtcttagggccggagaaacgcagacggcgtaccacacaggaaaagatcgcaattgttcagcagagctttgaaccggggatgacggtctccctcgttgcccggcaacatggtgtagcagccagccagttatttctctggcgtaagcaataccaggaaggaagtcttactgctgtcgccgccggagaacaggttgttcctgcctctgaacttctgccgccatgaagcagattaaagaactccagcgcctgctcggcaagaaaacgatggaaaatgaactcctcaaagaagccgttgaatatggacgggcaaaaaagtggatagcgcacgcgcccttattgcccggggatggggagtaagcttagtcagccgttgtctccgggtgtcgcgtgcgcagttgcacgtcattctcagacgaaccgatgactggatggatggccgccgcagtcgtcacactgatgatacggatgtgcttctccgtatacaccatgttatcggagagctgccaacgtatggttatcgtcgggtatgggncgctgcttcgcagacaggcagaacttgatggtatgcctgcgatcaatgccaaacgtgtttaccggatcatgcgccagaatgcgctgttgcttgagcgaaaacctgctgtaccgccatcgaaacgggcacatacaggcagagtggccgtgaaagaaagcaatcagcgatggtgctctgacgggttcgagttctgctgtgataacggagagagactgcgtgtcacgttcgcgctggactgctgtgatcgtgaggcactgcactgggcggtcactaccggcggcttcaacagtgaaacagtacaggacgtcatgctgggagcggtggaacgccgcttcggcaacgatcttccgtcgtctccagtggagtggctgacggataatggttcatgctaccgggctaatgaaacacgccagttcgcccggatgttgggacttgaaccgaagaacacggcggtgcggagtccggagagtaacggaatagcagagagcttcgtgaaaacgataaagcgtgactacatcagtatcatgcccaaaccagacgggttaacggcagcaaagaaccttgcagaggcgttcgagcattataacgawtggcatccgcatagtgcgctgggttatcgctcgccacgggaatatctgcggcacgggcttgtaatgggttaagtgataacagatgtctggaaatataggggcaaatccaagggttgtgttatccatactttcaggttggctgattcgcagcagaccattctttccagattcatcttatgntcgatatttcaccaaattaagncntttctnaagaggcggcccgtacccattcg

SEQ ID NO: 291 - DNA, 2386 bp, Homo sapiens
  misc feature (448): n equals a,t,g, or c
ctctgcctgtatgcttgacttgacttgacttgcacttattaaataactttgtcccagagagaaagagagagtgggcagacatcgaagccaaacagcagtatcccggaagcactcatgcaactttggtggcggccactcagttttctctgccagtgtckggtgattttacaacgagatgctgctctccatagggatgctcatgctgtcagccacacaagtctacaccatcttgactgtccagctctttgcattcttaaacctactgcctgtagaagcagacattttagcatataactttgaaaatgcatctcagacatttgatgacctccctgcaagatttggttatagacttccagctgaaggtttaaagggttttttgattaactcaaaaccagagaatgcctgtgaacccatagtgcctccaccagtaaaagacaattcatctggncactttcatcgtgttaattagaagacttgattgtaattttgatataaaggttttaaatgcacagagagcaggatacaaggcagccatagttcacaatgttgattctgatgacctcattagcatgggatccaacgacattgaggtactaaagaaaattgacattccatctgtctttattggtgaatcatcagctaattctctgaaagatgaattcacatatgaaaaagggggccaccttatcttagttccagaatttagtcttcctttggaatactacctaattcccttccttatcatagtgggcatctgtctcatcttgatagtcattttcatgatcacaaaatttgtccaggatagacatagagctagaagaaacagacttcgtaaagatcaacttaagaaacttcctgtacataaattcaagaaaggagatgagtatgatgtatgtgccatttgtttggatgagtatgaagatggagacaaactcagaatccttccctgttcccatgcttatcaytgcaagtgtgtagacccttggctaactaaaaccaaaaaaacctgtccagtgtgcaagcaaaaagttgttccttctcaaggcgattcagactctgacacagacagtagtcaagaagaaaatgaagtgacagaacatacccctttactgagacctttagcttctgtcagtgcccagtcatttggggctttatcggaatcccgctcacatcagaacatgacagaatcttcagactatgaggaagacgacaatgaagatactgacagtagtgatgcagaaaatgaaattaatgaacatgatgtcgtggtccagttgcagcctaatggtgaacgggattacaacatagcaaatactgtttgactttcagaagatgattggtttatttccctttaaaatgattaggtatatactgtaatttgattttttgctcccttcaaagatttctgtagaaataacttattttttagtattctacagtttaatcaaattactgaaacaggacttttgatctggtatttatctgccaagaatatacttcattcactaataatagactggtgctgtaactcaagcatcaattcagctcttcttttggaatgaaagtatagccaaaacataaaaaaaaaaaaatcctcagtatagcttgcaattaagacctagatcacagtatttaagtgttttgcgttttatacatgaggtcagtgctacagccacctagcatgaactaacccagcttccacctccataaagttacctagagttgttgagttggaatatgttctggcatttacctgacctgccaatcattagggagaggcaacaaggtaattcagcctttcctcctatcagcacaaagaaactcaaagctgttttttccctttctgttccaaagcagtcttatcctgacaggagcggtctatactagtgcagatttcaacacttttttttaacgttttaattactatagtgttatgtagagatttgattgagcagctaatgtttctgaactttacttactaattttcagtgtccttaagggttctgtagtgttatcaaagcaaaaagaaaatgctgcataaaaataccaaacttcagcaactgttaatactcagatcatatacctcttaataaatagcatcttatgctaattagccctgctaaactatgtacagaggaaactgttcaagtattggatttgaaagtaagtgacttatgtttaacagaactaatgatgtattgaaacactgtattatgaaaagctaaattatacatcattgtaactatgtagaaagtgtagactaatgtataatcaaaatgctaaggatttttatatggccttgtatgaggggagtttgaatgttaataaacatgttttccactttaagatccagtaaatgtctgttctactgtagtattacttaaaa

SEQ ID NO: 292 - DNA, 983 bp, Homo sapiens
aatcaacataaggaatatgacaagaccccagtaggtaaccctgagtgctcaggtccgagctgtggtctcttttacggcttcatgaaaggaccgtgccctcacggaggggaccacggcttggcttgtggggtcttaggtgatggctgccttctttcttcatcaccacacccagcttcttgctggcacttaggggaagagagcagcaaatgagagatttaccttttatctcccagcgagcgagatgtttccctgttcagagaggaagtaacatcacttatgcttgactggtgtttcttttgttgttgtttgtttttctttcaattggaattctgtatttaagatgttatgtcagctgacacatgggacactcctgaagaggtgactggccccccaccctgtttggcggtgagtttccgcaccaccggcctcagaagtgtccctcttgcttcgtctcttgttcgcttgctttgtaaatactttggtcccaagctgagacaattgctgtgtaaaacgtgaagagtcaatcccaaagggtgttatttgtcagaagaacttgccgtgtgccttcaccgaagcagtcaagtctgcagttggatttttctcactggtgaatgacaagaaacagggataattttgcactgcggagatattacgggagttgtctatatgattatatatagtacctgattctttgaacatattattgaactccaaaatgaattcgacctccattcaggcttcctgaaatctctgaagttgctgaaatttgtatattattttccttttccaatgcaagatctgctggtgacgggaaatgactgtctggttttattatggtttataaattaataaatgggctatttaattctgtatawaaatttacagcaagtacgtacactggaatgaatgaggcaatcacgttacaccaaatcagcagatcaaaagacaaacacatatttctgagacttgaaggtccagtcgac

SEQ ID NO: 293 - DNA, 2655 bp, Homo sapiens
  misc feature (2595): n equals a,t,g, or c
  misc feature (2611): n equals a,t,g, or c
  misc feature (2641): n equals a,t,g, or c
  misc feature (2651): n equals a,t,g, or c
ctttatagacaggactacaatcccaagccaaaaccttcaaatgaaattacacgagagtatatacccaaaattggcatgactacttataaaatagtgcctcccaaatccttggaaatatcgaaagactggcaatcagaaaccatagagtataaagatgatcaggacatgcatgctttagggaaaaagcacactcatgagaatgtgaaagaaactgccatccaaacagaagattctgctatttctgaaagcccagaagagccactgccaaaccttaaaccgaagcctaacctgagaacagagcatcaagtgcccagttctgtgagctcacctgatgatgccatggttagtcctctgaaacctgctcccaaaatgacaagagacactggcacagctccttttgcaccaaatttggaagaaataaacaatattttggaatcaaaatttaaatctcgggcttcaaatgcccaggccaaacccagctctttttttttgcagatgcagaagagagtatcgggtcactatgtgacatctgcagctgccaagagtgtccatgctgcccctaatcctgctccaaaagaactgacaaataaagaggcagaaagggatatgctgccttctccggagcagactctttctcccttaagtaaaatgcctcactctgttccacaaccccttgttgaaaaaactgatgatgatgtcatcggtcaggctcctgctgaagcctcccctcctcccatagctccaaaacctgtgacaattcctgctagtcaggtatccacacaaaatctgaagactttgaaaacttttggtgccccacgaccatactcaagttctggtccttcaccgtttgctcttgctgtagtgaaaaggtcacagtctttcagtaaagagcgcaccgagtcacctagtgccagtgcattggtccaacctccagccaacacagaggaagggaagactcattctgtaaataaatttgtggacatcccacagcttggtgtgtctgataaggaaaataactctgcacataatgaacagaattcccaaataccaactccaactgatggcccatcattcactgttatgagacaaagttctttaacattccaaagctctgacccagaacagatgcgacagagtttgctgactgcaatccgttcgggagaggctgctgccaaattgaaaagggttaccattccatcaaatacaatatctgtgaatggaaggtcaagactcagccattccatgtcccctgatgcccaggacggccattaaatgttaccctgccacaccactgcacttcacttccacttcagaccaacttcatactaatggaacattttggcaaatgtatattcagatgtacactaatatattatctattaaaatattagaatttgtgttgtggcttttaatgccagaagaaaagttaccagaatttataatttatagtaattttttgatcttttttttgccttaagagttgaatatgctgctttagaactttaaaacaaggtgtaaatgattttcattttttacaaatgaaaaataattcctttgtattgatttcacttaccagcacattctctacaatggtgacttagacaaaagtataagattcatagactttatatttgtatgacatacaactaggacaaacatagatatgacatttgctgcctcagtgtagcaattggaaatatttataagttatatgaaagcctgttttgggctgaaagaatgatttagaaaactagtgataccaaataagtatattcagttcaataattattttcaatgatgaatcacttagtgtgaaagacttgccttgtgtattctttatgtaattacaaatcactgtcaattttatgggaagctcatagtattttaatattttattaacatggaactcttgtttttttaatctttagaacttaaattctacaagaattttaaatattttctgtatataattatgacattgtcacacagaaattacacattttatgtgccagaagccttaaacatctttctgtgaaaatgctgatatattgtgacagttatttcacatttgatatgtagagaggaataggggttagtttatgtttatattgaaaaactttaaagactatttggaagttccagaaattctggttttaattcaagtaaaatgataaaatagtcattatatagttcagatgctaatattctaagtaataatatatatttacattgaagctaaaactgttaagcaaaacaatgcccatttgtcggcttacagctcttccggagtctagagcctgttggtgttctgtccctactttaagaatttaattgctcacttattctgaaagctttgttcaaacaagatgatattaaatttgttttcactaaaactaaaaaaaaaaaaaaagggcggccgctctagaggatccctcgaggggcccaagcttacgcgtgcatgcgacgtcatagctctctccctatagtgagtcgtattataagctagcttgggatctttgtgaaggaacttacttctgtggtgtgacataattggacaaactacctacagagatttaaagctctaaggtaaatatnaaatttttaagttgtntaatgtgttaaactaactgcatatgcttgntgcttgaaantttg

SEQ ID NO: 294 - DNA, 1738 bp, Homo sapiens
  misc feature (854): n equals a,t,g, or c
  misc feature (1679): n equals a,t,g, or c
  misc feature (1693): n equals a,t,g, or c
  misc feature (1717): n equals a,t,g, or c
  misc feature (1729): n equals a,t,g, or c
ggtggagcaaagaaacctgccctggaaatttgaacatataggcattgggcttctgtctctactgctgaragatgaccgagtgttgcctcttcgtgccatacggttttttgttgaraatctcaaccatgatgcaattgtagttcgaaagatggctatctcagctgttgctggtatccttaaacagctaaaaagaaccacaaaaagctgaccattaacccctgtgaaatcagtggatgccctaaacccacccaaattattgctggtgataggcctgataatcattggttgcattatgacagcaaaactataccaagaactaaaaaagaatgggagtcaagttgctttgtggaaaaaactcactggggatactacacctggccaaagaatatggttgtttatgctggtgtggaagagcagcctaagcttggcagaagcagggaggatatgacagaggcagaacagattatatttgatcatttttctgatcctaaatttgttgagcagttaattacttttctatcattagaagacagaaaaggaaaagataagtttaatccacgacgtttttgyctctttaagggtatattcaggaattttgatgatgccttcctgccagttctgaagccccatttagaacatttggttgcagattcacatgaaagcacccagcgatgtgttgcagaaattatagctggtttaatcagaggttctaagcactggacatttgaaaaggtggagaagctttgggagcttctgtgccctctgcttagaacagcactgtccaatattaccgtagaaacttataatgactggggagcttgtatagcaacatcctgtgaaagcagagatccccnggaaacttcactggctttttgaactgctgttggaatcaccattgagtggtgaaggaggatcctttgtagatgcatgtcgactttatgtactacaaggtggccttgcccagcaagaatggagagtgcctgaactattgcacagactactgaagtacttggaacccaaactcacccaggtttacaaaaatgtcagagaaagaataggaagtgtgctgacctacatattcatgatagatgtatctttgccaaataccacaccaaccatatcgcctcatgtccctgagtttactgctcgaattctggagaaattgaaacctctcatggatgtggatgaagaaattcagaaccatgttatggaagaaaatggaattggtgaagaagatgagcgaactcagggcattaaactcttgaaaaccatattgaaatggctgatggcaagtgcaggaagatccttttctacagcagttacagaacaacttcagcttctacctttgtttttcaagattgccccagtggaaaatgacaatagctacgatgaactgaaaagagatgcaaagttatgtttatcattaatgtctcaggggttgctttaccctcatcaagtgcctttggtacttcaggtgctaaaacaaacagcaagaagcagttcttggcatgcacgatacacagtactgacctacctccagaccatggtattttataacctctttatttcctaaacaatgaagatgcagttaaaggatatcaggtgggctgggttataagtcttttgggagggacgaaccaactgggagggttccggagaaatgggctggcctaacttanccttaagccgggtntggctaaacagtggtaaacttttnccttaacccatngggaccagt

SEQ ID NO: 295 - DNA, 1020 bp, Homo sapiens
  misc feature (5): n equals a,t,g, or c
  misc feature (31): n equals a,t,g, or c
  misc feature (37): n equals a,t,g, or c
ccggnccggcattcccgggtcgacccacgcntccggngcggtggccctgtatttcatcgataagctggcactgagagcaggaaatgagaaggaggacggtgaggcggccgacaccgtgggctgctgttccctccgsgtggagcacgtccagctgcacccggaggccgatggctgccaacacgtggtggaatttgacttcctggggaaggactgcatccgctactacaacagagtgccggtggagaagccggtgtacaagaacttacagctctttatggagaacaaggacccccgggacgacctcttcgacaggctgaccacgaccagcctgaacaagcacctccaggagctgatggacgggctgacggccaaggtgttccggacctacaacgcctccatcactctgcaggagcagctgcgggccctgacgcgcgccgaggacagcatagcagctaagatcttatcctacaaccgagccaaccgagtcgtggccattctctgcaaccatcagcgagcaacccccagtacgttcgagaagtcgatgcagaatctccagacgaagatccaggcaaagaaggagcaggtggctgaggccagggcagagctgaggagggcgagggctgagcacaaagcccaaggggatggcaagtccaggagtgtcctggagaagaagaggyggctcctggagaagctgcaggagcagctggcgcagctgagtgtgcaggccacggacaaggaggagaacaagcaggtggccctgggcacgtccaagctcaactacctggaccccaggatcagcattgcctggtgcaagcggttcagggtgccagtggagaagatctacagcaaaacacagcgggagaggttcgcctgggctctcgccatggcaggagaagactttgaattctaacgacgagccgtgttgaaacttcttttgtatgtgtgtgtgtttttttcactattaaagcagtactggggaattttgtacaawaaaaaaaaaaaaaaaaaaaaaaaaaaaaa

SEQ ID NO: 296 - DNA, 684 bp, Homo sapiens
  misc feature (660): n equals a,t,g, or c
  misc feature (675): n equals a,t,g, or c
tcgacccacgcgtccgaatttttttctcagaatagcaatagcttatccaaagaaagctagtgtacatcttccaaagcttttaaaataaaaaagaggaggagttacacttgcagaatgtatatcttctgggatgcttctccctactccactggacactgtttgaaagtttgtagtttataatattcttacctaggctgtgttggtcagcttagaatatctaagtgataggataaaactaaagctgagtggcaaactgccagtctatatactgcatttagtctataggctgttttgtttggcccacaaagcattttattatttaagtttatgccaacatttaagaatcaagaatttcccagacattcagatttctgacttcaattgaaaatctgacagtataaaccctattatattcctgcatggcataaaatcttcagttgctgaatggtgatatccacttttagaaagagtactctaccctgttctgcattcatacaacctaagccaacccgcccttcaccatcccacttctctttcaggttatctgcttaggctggtaggcatttgtgtttataaaccttgaactcaagctgctagatggtcagttgcattgtgaactgaactatctgaatgatttttcattgtaaatatatagctatnggaccactttaaatncccctttct

SEQ ID NO: 297 - DNA, 1838 bp, Homo sapiens
ccggcgtgggtccgggcaagaaccgcttgtrgtttggtttaaattctgcacgggaggaccttctgagtttacctgttgggctcctggctgcgcaggcacagcagctacacagaagagatgggagaagaggctaatgatgacaagaagccaaccactaaatttgaactagagcgagaaacagaacttcgctttgaggtggaggcatctcagtcagttcagttggagttgttgactggcatggcagagatctttggcacagagctgacccgaaacaagaaattcacctttgatgctggtgccaaggtggctgttttcacttggcatggctgttctgtgcaactgagcggccgcactgaggtggcttatgtctccaaggacactcctatgttgctttacctcaacactcacacagccttggaacagatgcggaggcaagcggaaaaggaagaagagcgaggtccccgagtgatggtagtgggccccactgatgtgggcaagtctacagtgtgtcgccttctgctcaactacgcagtgcgtttgggccgccgtcccacttatgtggagctggatgtgggccagggttctgtgtccatccctggtaccatgggggccctctacatcgagcggcctgcagatgtcgaagagggtttctctatccaggcccctctggtgtatcattttggttccaccactcctggcactaacatcaagctttataataagattacatctcgtttagcagatgtgttcaaccaaaggtgtgaggtgaaccgaaggcatctgtgagtggctgtgtcattaacacctgtggctgggtcaagggctctggttaccaggctctggtgcatgcagcctcagcttttgaggtggatgtcgttgttgttctggatcaagaacgactgtacaatgaactgaaacgggactcccccactttgtacgcactgtgctgctccctaaatctgggggtgtggtkgagcgctccaaggacttccggcgggaatgtagggatgagcgtatccgtgagtatttttatggattccgaggctgtttctatccccatgccttcaatgtcaaattttcagatgtgaaaatctacaaagttggggcacccaccatcccagactcctgtttacctttgggcatgtctcaagaggataatcagctcaagctagtacctgtcactcctgggcgagatatggtgcaccacctactgagtgttagcactgmcgagggtacagaggagaacctgtccgagacaagtgtagctggcttcattgtggtgaccagtgtggacctggagcatcaggtgtttactgttctgtctccagcccctcgcccactgcctaagaacttccttctcatcatggatatccggttcatggatctgaagtagagatcagcaggaagccttgctgcctgggacatagagatcatctggccacccctagaggcagatgggctgagataaaagactgttggggccacctgaccagtaaactgtggactagtagaaagttcatattctacctctaaaaacaggtagtggtaacctgactcttctaatcttgaaccaaaaggaaaaccatgagactgtaattggtttcttagaccacctaagatgccactttgaattctctaagaccctggagaattgcatttctttcactgtgctactatgtggtttttaaaaaatcaatgctttatattccatatgtggttcttacccatttatctaggatgaaagtgtgaattagagggactccttccaataaagttcaaacttaaaaaaaatcattttaataaatatttttgccatatcataaaaaaaaaaaaaaaaa

SEQ ID NO: 298 - DNA, 1635 bp, Homo sapiens
  misc feature (1609): n equals a,t,g, or c
  misc feature (1635): n equals a,t,g, or c
gcggaagtgcttcgcggcggaggcccgggcaactcttttgaatggaatcgggctgattcatcgccggtttgcagactgagccgcgtcgggtgtgcgccgctgctgctgttgcctctgtcttcgcgtcaccacagaggcaagacaagggtccatatcgcggcatccggctcccgcccgtcttcaggagagaaagaaaaaataaaatatacttggggaagttgtacctgccagaattagcaagagctttctttaagaagacatttgtcaaactcaacaaattgaaggttaacaccttaagagttgtagttactgaccagaaatatggacagacttcttagacttggaggaggtatgcctggactgggccaggggccacctacagatgctcctgcagtggacacagcagaacaagtctatatctcttccctggcactgttaaaaatgttaaaacatggccgtgctggagttccaatggaagttatgggtttgatgcttggagaatttgttgatgattataccgtcagagtgattgatgtgtttgctatgccacagtcaggaacaggtgtcagtgtggaggcagttgatccagtgttccaagctaaaatgttggatatgttgaagcagacaggaaggccggagatggttgttggttggtatcacagtcaccctggctttggttgttggctttctggtgtggatatcaacactcagcagagctttgaagccttgtcggagagagctgtggcagtggttgtggatcccattcagagtgtaaaaggaaaggttgttattgatgccttcagattgatcaatgctaatatgatggtcttaggacatgaaccaagacaaacaacttcgaatctgggtcacttaaacaagccatctatccaggcattaattcatggactaaacagacattattactccattactattaactatcggaaaaatgaactggaacagaagatgttgctaaatttgcataagaagagttggatggaaggtttgacacttcaggactacagtgaacattgtaaacacaatgaatcagtggtaaaagagatgttggaattagccaagaattacaataaggctgtagaagaagaagataagatgacacctgaacagctggcaataaagaatgttggcaagcaggaccccaaacgtcatttggaggaacatgtggatgtacttatgacctcaaatattgtccagtgtttagcagctatgttggatactgtcgtatttaaataaagcaacgaaaaacgctattaatgatgccttcagtgtatattcctctgttgttcctaatgctcaaaatcaagggacctctgaaggtgtacttggctaaatgtaagacatctggcatcatttgcagcactgtaacaccttcagtctcagttgtgcaattacttctgtttctttagtcagggtctttgcagattctaaagttatacatgaatacatcaaagtggacaaattttgttaagatcccatttaatatttgaaaaaatcagtagcacaaatatattttgattgtcacttacaaaataaaatacatttacagtcwaaaaaaaaaaaaaaaaaaaaaaaaaaaaaaaaaaaaaanaaaaaaaaaaaaaaaaaaaaaaaaan

SEQ ID NO: 299 - DNA, 868 bp, Homo sapiens
  misc feature (790): n equals a,t,g, or c
  misc feature (857): n equals a,t,g, or c
  misc feature (860): n equals a,t,g, or c
gctgaggggtagcgatgcgggctccggggatgaggtcgcggccggcgggtcccgcgctgttgctgctgctgctcttcctcggagcggccgagtcggtgcgtcgggcccagcctccgcgccgctacaccccagactggccgagcctggattctcggccgctgccggcctggttcgacgaagccaagttcggggtgttcatccactggggcgtgttctcggtgcccgcctggggcagcgagtggttctggtggcactggcagggcgaggggcggccgcagtaccagcgcttcatgcgcgacaactacccgcccggcttcagctacgccgacttcggaccgcagttcactgcgcgcttcttccacccggagagtgggccgacctcttccaggccgcgggcgccaagtatgtagttttgacgacaaagcatcacgaaggcttcacaaactggccgagtcctgtgtcttggaactggaactccaaagacgtggggcctcatcgggatttggttggtgaattgggaacagctctccggaagaggaacatccgctatggactataccactcactcttagagtggttccatccactctatctacttgataagaaaaatggcttcaaaacacagcattttgtcagtgcaaaaacaatgccagagctgtacgaccttgttaacagctataaacctgatctgatctggtctgatggggagtgggaatgtcctgatacttactggaactccacaaattttctttcatggstytacaatgacagccctgkcaaggtctctgtngggtcgttgagggcaaggaccctgttttattcaacctgggaactcagtgtttgccacatgtgaggcncanggtagttc

SEQ ID NO: 300 - DNA, 547 bp, Homo sapiens
  misc feature (526): n equals a,t,g, or c
  misc feature (542): n equals a,t,g, or c
ccacgacgtccscggaacgctsgttgacggggcctgagcctctccgccggcgcaggctctgctcgcgccagctcgctcccgcagccatgcccaccaccatcgagcgggagttcgaagagttggatactcagcgtcgctggcagccgctgtacttggaaattcgaaatgagtcccatgactatcctcatagagtggccaagtttccagaaaacagaaatcgaaacagatacagagatgtaagcccatatgatcacagtcgtgttaaactgcaaaatgctgagaatgattatattaatgccagtttagttgacatagaagaggcacaaaggagttacatcttaacacagggtccacttcctaacacatgctgccatttctggcttatggtttggcagcagaagaccaaagcagttgtcatgctgaaccgcattgtggagaaagaatcgagtggtgaaacagaacaatatctcactttcattatactacctggccagaatttggagtcccttgaatcaaccagcttcanttctcaatttcttggntaaag

SEQ ID NO: 301 - DNA, 865 bp, Homo sapiens
ttagtagagatggggtttcaccacattggccaggctggtctcaaactcctgacctcaagtgaatccacctaccttggcctaccgaggtgctggaattacaggtgtgagccaccgcgcctggcctaatactgctttattacaacgttatctgtgggtcggaatccttttatattggttaacagatgaccctgactcagaataatctttttcaatggctttttgagggaagcttgtgaagttctggtgaatcttctttttcacttcactttcagtgagctgaaagtaaccaaactaaatacatgtattgtgtaaagggacaggacaagacagccttaaaaaattgaatatagttggtgagacaactcagaagtacaggtttgagcatcccttattcaaaatgcttgagaagtgttttgggttctggaatatttgcattaatgcttgccagttgagcatcccaggtccggaaatccacagtgctccaatgagcctttcccctgagtgtcacatctgtattggcactcaaaaagtttcatattttggagcatttcagatttcagatttgggatgcttcatctatattgacagctgcaagaacagaaaggaagaagagattatttttgtgggagaacagtttctcccatagtgtttcctgtggaatgctagtgtctcataaagtcttcyaaaaaaaaraaaaaaaaatcaaatgtttggaagccattttgtgttactgtgtgactttcttttactcaaaaacagcaccataaaatttctgacaagtactataggtaaagaaatccctttatacttaacctagtattttctacctttccccatctaaaataaaatttttataccactttct

SEQ ID NO: 302 - DNA, 815 bp, Homo sapiens
asaagcataaacataagcacaaacacaagcataagcatgacagtaaagaaaaggacaaggagcctttcactttctccagccctgccagtggcagtctattcgttctccttccctttcagactgagaaggggacaaaaagacctttcctttcatgtccagaagaatgtatgtaactaaagctttgtcctctgtgaagaattataaaagggaggggggaaaggattcgcctctcctacagaaattctgaattcatttaagttctaagcatttgatttatgttatttatacagttgggatctaattaggaaaatgtgttttgtagttctggataaactatttcatccgctgtttcctccccaaaacacacacacagagcaaactccctttcataaaagccctcatatccactggcagtccccgttcgcatcatggtctccatgtgtaccgccaaagtcaattatgtttgaaagcctttggtggatgttatggggcaaagttatgatttacacagaagcaactgccaaatctgtggtgcaaccactatctccagtgaaatattgtataacaccatttggaactactgaaaagacagtggcttttctacagtactcttccttattgcaccatttttgtattaacgtagaaactaagcatcagaatttatgaacaaagaatatgttatttttccytttgcyctaaaatactgaggatttggggaagcaattcytttttaaaaaaattttggaataactaycttttgrtacacattcgggsggttacggtgttggggatttaggcaggactatccaaatccc

SEQ ID NO: 303 - DNA, 1919 bp, Homo sapiens
  misc feature (1907): n equals a,t,g, or c
actgacagtacggtcggaattcccgggtcgatccacgcgtccgcggacgtggsacaaaaacagatgctaggaagcttggcttcctcttcttgttgacccttttttgaaccaacatcttttttattatattcagagtatgtttttaagtgtatcttaatatatacattttttaggacatcttaaatctaaacaaaaaataaaatgaacatctcttgaaacctgttaaaacaaccagttaaagccacagatggctttcagggcagtagcagcagaggccagtggactctgaggactcctgaggggcggggcgtgtagccagccaggtgcatgccgggaccatggcccccatacttggctgcttcctgtgacagtgaaatacatccttcaaggtggcagctgttagggctgaatcttctggagaaaaaggtgccatctcaggagaatagcttttactctggtaggaatgcttccgagacaccacaaggcagcctgaacactcagttgcagggtcgggcttgcggtgggtgacccagagccaccaaagtcacatccacaactaatgagggaaatctgtaaagccagttagatagaagaattttatttttctgtgggttttgtgttgtcttttttatgttaaaaagaaatccagtttgtgtttttctatagraaaagtaaaagatcaggttatactttaggttaggggttctatttattcctgttagtaaataaaattaacaaatttctttgtttaacaaaagattaatctttaaaccactaaaatacatagactgattgattattcaacacattggaattgatgtcggtcatagtttcctgaagcatttagttacaacctgaaggaataaaatgatttgtggaaatgcttaaaatagacctaactgaatacagtctcatcttgccgcgcctggcttacctatctgtggaaagctaggcttcccaggctgggctctgctgtctggtgcctggaggtgtgggagggaagatgagttatttaactggtaagcgatttgaaacactatttttatattaaagtaaatggcatggagtatagtgcaaattcatttttaagatagaacacaaaacttgaaagaagttttatgcgtgtgacagtgtatggggctgcagttggtctccctggaggggacttccacacctcctgcctttaggccatgggtggaaagtgctcagtgaagtacacctgtgtggcccagttctgaaagctttatacagttgaattttaagtggggttgataacaccttggactgttagtgttaaaaatctagtgggttgacctttaaatgcaacagtttttaaaatatattgctgcattttatagaatagtaaaggtacgattatacttgagattttcctccatttttatttcttcgtgaacatagagtttggggccgaaaatgtttttaaagtatgtgtttgagttaaatataaagttggttcacttcaaagctaaaaaattgttaaacttgcagcttggtattgcagagaagattttataagaattttgctttagagaatgccactttggctgaactacaagtgtaggccaccattataatttataaatacagcatacttcaaaactgtttgttatctcttgttaccatgtatgtataaatggaccttttataaccttgttctctgcttgacagactcaagagaaactacccaggtattacacaagccaaaatgggagcaaggccttctctccagactatcgtaacctggtgccttaccaagttgtgcttttctgttttcaagtgtaaatgatgttgagcagaatgttgtacttgaaaatgctataagtgagatggtatgaaataaattctgacttatgaaaaaaaaaaaaaaaaagtcgacgcggccgganatttagtagtag

SEQ ID NO: 304 - DNA, 157 bp, Homo sapiens
  misc feature (112): n equals a,t,g, or c
aggtgtacaccctgcccagccacaagccgatttttaaaaggtcaaatgctatgacagccattttacaggaaaaaaaaaaattgtatagttgtggtgacgttcctcacacagngcaccagcttcagggagtctgtcccttgcagacccctgaacccgg

SEQ ID NO: 305 - DNA, 343 bp, Homo sapiens
  misc feature (270): n equals a,t,g, or c
  misc feature (291): n equals a,t,g, or c
aatgcagtgttttcgattactgatctctcattacccaactatctgatggcatcttcggttggactgcttcctacccagcttctgaattcttacttgggtaccaccctgcggacaatggaagatgtcattgcagaacagagtkttagtggatattttgttttttgtttacagattattataagtataggcctcatgttttatgtagttcatcgagctcaagtggaattgaatgcagctattgtagcttgtgaaatgggaactggaaatctnctctggttaaaaggcaatcanccaaataccagtgggctctttcattctacaacaagaggaccctaacattttt

SEQ ID NO: 306 - DNA, 696 bp, Homo sapiens
  misc feature (553): n equals a,t,g, or c
  misc feature (585): n equals a,t,g, or c
  misc feature (593): n equals a,t,g, or c
  misc feature (649): n equals a,t,g, or c
  misc feature (661): n equals a,t,g, or c
gaagcaggcaggttgctcagctgcccccggagcggttcctccacctgaggcagactccacgtcggctggcatgagccggcgcccctgcagctgcgccctacggccaccccgctgctcctgcagcgccagccccagcgcagtgacagccgccgggcgccctcgaccctcggatagttgtaaagaagaaagttctaccctttctgtcaaaatgaagtgtgattttaattgtaaccatgttcattccggacttaaactggtaaaacctgatgacattggaagactagtttcctacacccctgcatatttggaaggttcctgtaaagactgcattaaagactatgaaaggctgtcatgtattgggtcaccgattgtgagccctaggattgtagaacttgaaactgaaagcaagcgcttgcataacaaggaaaatcaacatgtgcaacagacacttaatagtacaaatgaaatagaagcactagagaccagtagactttatgaagacagtgctattcctcaatttctctacaaagtggcctcagtgaccatgaagaangtagccttctggaggagaaattcggtgacagnctacaatnctggctggttacaaatccaaggcccagacccaatattcccaacaaaaaacttttgnttggccaggtcnttcaatttttgaaaaaaagtgggttttggtttaac

SEQ ID NO: 307 - DNA, 396 bp, Homo sapiens
  misc feature (394): n equals a,t,g, or c
cctaggcctcccaaaatgttgggattacaggcgtgaggcaccgcacccaacctaacagaggaaacacttcaaatgcacatcctcacatttctagtctacgtagctggaaaaaaaggacattyttaatatgctaatgtggaggtcacctagttaccctaagggagaaaagcaaggcaaggacccactgcacagcaagttcccccttggaagcccacgggcgcactgcccacaaatgcacataatctctgcagaaatacaaaagccctaatgctggctgcactggggacacaggtaggaggaaattttcccctgtaagcagttttgaattctgaactatgtggacagamcaccaattttaaaacaatgaaagtgagttggctgggcacatggtttngc

SEQ ID NO: 308 - DNA, 549 bp, Homo sapiens
agagacagggggcaagaaggggtgtmagggcccagtracaaaatcattggggtttgtagtcccaacttgctgctgtcaccaccaaactcaatcatttttttcccttgtaaatgcccctcccccagctgctgccttcatattgaaggtttttgagttttgtttttggtcttaatttttctccccgttccctttttgtttcttcgttttgtttttctaccgtccttgtcataactttgtgttggagggaacctgtttcactatggcctcctttgcccaagttgaaacaggggcccatcatcatgtctgtttccagaacagtgccttggtcatcccacatccccggaccccgcctgggacccccaagctgtgtcctatgaaggggtgtggggtgaggtagtgaaaagggcggtagttggtggtggaacccagaaacggacgccggtgcttggaggggttcttaaattatatttaaaaaagtaactttttgtataaataaaagaaaatgggacgtgwaaaaaaaaaaaaaaaaaaaaaactcgagactagttc

SEQ ID NO: 309 - DNA, 1778 bp, Homo sapiens
  misc feature (1704): n equals a,t,g, or c
  misc feature (1744): n equals a,t,g, or c
ctgtcttggccttccagggtgctgggattacaggcgtgagccactggaacctggccttgttttgctttattttttctcttacatgaagtaaagcgctttggtcaaacacacaaaaatactgccttgtactggtggttggtttcattagtggatcacacacagtgttctacttggcttgtaaaatggtgccttggatagggtgagtttggataagtatgtatgtatgtatgagttatagcaaaattaagtagattgaatcaagtccatgcaaaagcaataaaacagttttaattttttaattttttaaaaattaaaactttaataaaacagtttttaattttttgctaggttcttttaaaaaatgatgtaacttacatggaagtcttcacaggacttttttctttcctggaactattgaaatgtaatttaggatgatttgatcttccatctcaagttgtcaacatggctgtgtcattctggcttacatatgttttatttaacaaaattctagtcaagggataagggcataatgaagacaagcttcagttatgaaagtacaaactatttgtgtgattaatttttaaaaatgacattaagaagcccattgtaaaataatatttgcagtcaaatggtttttcttgctgtaagtcctgttgtagctatgtttagggtagtggttctcatctaccttggagtgcataagacttacctagcaggcttgtttaaaaagttcagattcctagctttgtacccagggattgcctcaggtggtatgggctgtggtcctggagtcatcacttttataaatagtggttcagagaccacagagagagactgcttcatcgaatgggaagtaccaaggagaaagtacaattcagtattgtctggaggcaagtggacactttgtacctgaggtttagaataggtggtctcttgccagtacaatccccaggcgttttctgtgttcagaagtagtaagaatgcctttaattcagaggattatctaagctctttaaagctgtttttctccattgtcatagtgccttctctgaaaaatgaatgtacaggtatcctattttctaatgtaattaggattttttaaaagcaatttttgatagtttttcttttaaaaagtaaaattcagcactgtgacttgaacccccaaatctttcacatacaggtgaaacattaagccacaaataaaaataatgaacaagaaagaagacaagatcctaattcctgtcattagtgacctaagtaccccatatcagaaactttgcaaaacagatctagggacagaagggctttgaaagacatttttctttggggcaaatttcgtgtgccagaactacagtttaaatgtttttatgagcaagggaaggtagcattgattcccatagctttctaattagatacatgctgtcatggatgtaagccttaaaggagttaatactaatcttgtacatacacaaattttcctcaggtttttttattttaaaaaatgatttgttaaaagtactgtctgctagacccttgcctttgagtggctttgaaacttaatatagtttttaaaaagtgcaatgggatgagattatgctattagtatattaaaagcatgtttctgttttactccaatttgtaagatcatttaatggaataaagatcacaacaccaaaaaaaaaaaaaaagggcgggccgctctanaagatccaagcttacgtacgcgttgcatgcgacgtcatanctcttctatagtgtcactaaattcaattcactgg

SEQ ID NO: 310 - DNA, 771 bp, Homo sapiens
attaatttaaaaagccccccaatctgtggtattttattatggcagccctagcaagctaatacagtggtttgagaggctgggagggttgaggggaagataaacttttaaaaagctcttatctttcatttcaatcagttaaaaatacttgctcagtgtaacaattttgcttctcagcttccactctaatattgttgtgccattaagcaatttagctaatcctgacatttcttagattcataatgttaggagcatttaatctgtattttacaagttaggaagcagaggatcagagatgggaaaggactagcccaaggccaacattaacaagccctctaacaaaaactttacaatacatttatgttgaatggaactccaagatctcacctctccatccaggaatggagtccatgtaatcaaagtgaacttaaaaataggacagtttcaacaagtcaggagattcacagcaactgatcaaagggagtccagtcaacgtgagcaagcgtgattatgatgaggaagccccctctgctttaatccacacaaggaacgtaacctgaagtaacctgatgttaaccaatctgctgtgtctactatgctgtttccttgttcctgctagtgctgctttacaaatgcagaccattctatcatacctggcrgggcttctgttttattttgtaggctggatgctacccagttcatgaatcgctaataaaagccaattagatctttataaaaaaaaaaaaaaaaaattactgcggccgacaagggaat

SEQ ID NO: 311 - DNA, 1419 bp, Homo sapiens
  misc feature (21): n equals a,t,g, or c
  misc feature (26): n equals a,t,g, or c
  misc feature (1005): n equals a,t,g, or c
tcttgaaaacccgggtcgacnggacncgtccgcgaaggccagcccttcgaatactttgtttatggagctgcctgttccgaggttgaaatagactgcctgacgggggatcataagaacatcagaacagacattgtcatggatgttggctgcagtataaatccagccattgacataggccagattgaaggtgcatttattcaaggcatggractttatacaatagaggaactgaattattctccccagggcattctgcacactcgtggtccagaccaatataaaatccctgccatctgtgacatgcccacggagttgcacattgctttgttgcctccttctcaaaactcaaatactctttattcatctaagggtctgggagagtcgggggtgttcctggggtgttccgtgtttttcgctatccatgacgcagtgagtgcagcacgacaggagagaggcctgcatggacccttgacccttaatagtccactgaccccggagaagattaggatggcctgtgaagacaagttcacaaaaatgattccgagagatgaacctggatcctacgttccttggaatgtacccatctgaatcaaatgcaaacttctggagaaaacagagtgcctcttcccagatggcaatctgtcctatctctgtgctggaagatgctagatctgaaagacagagtttccacagttcagaaatcatcccacagtgttgcttttctatggagctgatttaaagtattccatttagatttgatagatatgcttaagcaatctataaatcattttcaatgttataaacactaattggtttcctctagggtgatattcgtcattactctgtctcttcaatccatccagctaaatggaataggtgatgacttgcatgtgactcctacttggcttctatccaccaacagaaattataccatatagtgaaaggcaattttctaaataatttcattactaatatgaactgtgaagttgtcattttttcatttgnccttttctgctatcaccttcctcttgtcagaatgaatatagacactgtatctaagtgggaccaaagaaaaaatagcgaactttcaccaaagttttcatgaaaacccaaaagctttaaaagktactatcaagaaattgaaaggaaacccacagaataggataaaatatttgtaaatcatatatttgataaaagtcttgtaaccagatacataaagagctcttacaactcaataaaaggcaagtaatttaaaaataggcaaaagaattgctggatggtatggtagttctatttttagtttttaccctaactactctgacttgatcatttaacattctgtgtatgtaacaaaatatcacatgcataaatattatgtatcaataaaattttttaatgggcaaaaaaaaaaaaaaaaaa

SEQ ID NO: 312 - DNA, 526 bp, Homo sapiens
  misc feature (525): n equals a,t,g, or c
gggaagttcaaagggaatttttttattgtttagcttgtttttaggttgcagtaaattctctaggtcatccagcaggattaggaagagaagcattgtgagaaacaggttttgggttttgctgaaatttgcttgtcagcattgcatcacttttccttaactgttctctaagtactgatgtctttcaaattgactcagakcatactccttatctttgagcagaatattttgaacagaaaawtaagccattttcatttatatacctaattcaataggtttataaataaaagggcaaatcctcacgaataatacagtacagtgaaaaattgctctccccctaggaactgaggaatagaaaaacaatttcctcttacattgtttatagtaggtagcccttgaaaagaaaatcacttatccctgccacccccatggtcctcataacaagttagggaaactgaaattgctggaaatttaggattctwaggcamcaggcwgggaaatagggtcctcatacctgacctttttctnc

SEQ ID NO: 313 - DNA, 2435 bp, Homo sapiens
  misc feature (15): n equals a,t,g, or c
  misc feature (2408): n equals a,t,g, or c
ggcacgagcgcgaangacacggcctgggcgccgactgcagagccgggaggctggtggtcatgccggggttcctggttcgcatcctccttctgctgctggttctgctgcttctgggccctacgcgcggcttgcgcaatgccacccagaggatgtttgaaattgactatagccgggactccttcctcaaggatggccagccatttcgctacatctcaggaagcattcactactcccgtgtgccccgcttctactggaaggaccggctgctgaagatgaagatggctgggctgaacgccatccagacgtatgtgccctggaactttcatgagccctggccaggacagtaccagttttctgaggaccatgatgtggaatattttcttcggctggctcatgagctgggactgctggttatcctgaggcccgggccctacatctgtgcagagtgggaaatgggaggattacctgcttggctgctagagaaagagtctattcttctccgctcctccgacccagattacctggcagctgtggacaagtggttgggagtccttctgcccaagatgaagcctctcctctatcagaatggagggccagttataacagtgcaggttgaaaatgaatatggcagctactttgcctgtgattttgactacctgcgcttcctgcagaagcgctttcgccaccatctgggggatgatgtggttctgtttaccactgatggagcacataaaacattcctgaaatgtggggccctgcagggcctctacaccacggtggactttggaacaggcagcaacatcacagatgctttcctaagccagaggaagtgtgagcccaaaggacccttgatcaattctgaattctatactggctggctagatcactggggccaacctcactccacaatcaagaccgaagcagtggcttcctccctctatgatatacttgcccgtggggcgagtgtgaacttgtacatgtttataggtgggaccaattttgcctattggaatggggccaactcaccctatgcagcacagcccaccagctacgactatgatgccccactgagtgaggctggggacctcactgagaagtattttgctctgcgaaacatcatccagaagtttgaaaaagtaccagaaggtcctatccctccatctacaccaaagtttgcatatggaaaggtcactttggaaaagttaaagacagtgggagcagctctggacattctgtgtccctctgggcccatcaaaagcctttatcccttgacatttatccaggtgaaacagcattatgggtttgtgctgtaccggacaacacttcctcaagattgcagcaacccagcacctctctcttcacccctcaatggagtccacgatcgagcatatgttgctgtggatgggatcccccagggagtccttgagcgaaacaatgtgatcactctgaacataacagggaaagctggagccactctggaccttctggtagagaacatgggacgtgtgaactatggtgcatatatcaacgattttaagggtttggtttctaacctgactctcagttccaatatcctcacggactggacgatctttccactggacactgaggatgcagtgcgcagscacctggggggctggggacaccgtgacagtggccaccatgatgaagcctgggcccacaactcatccaactacacgctcccggccttttatatggggaacttctccattcccagtgggatcccagacttgccccaggacacctttatccagtttcctggatggaccaagggccaggtctggattaatggctttaaccttggccgctattggccagcccggggccctcagttgaccttgtttgtgccccagcacatcctgatgacctcggccccaaacaccatcaccgtgctggaactggagtgggcaccctgcagcagtgatgatccagaactatgtgctgtgacgttcgtggacaggccagttattggctcatctgtgacctacgatcatccctccaaacctgttgaaaaaagactcatgcccccacccccgcaaaaaaacaaagattcatggctggaccatgtatgatgatgaaagcctgtgtctttgagggattctaccctgaacatacctcacagatcctccctgtcatgccacatttcactgattggaatgtggaaatggaaaaggaatttaggatgtgcattttcacctgaggtttccctgcatccctgcagtgccaaagccccaccttcagggaccacctggaatgtgtgaggggctgacagcacagtaacgtgcatacatatctgcagggctggaatggaagctttaaaggtggtagtgatttttattttggaagaatcatgttacctttttgttaaataaaatttgtactcaaanaaaaaaaaaaaaaaaaaaaaaaaaaaa

SEQ ID NO: 314 - DNA, 2543 bp, Homo sapiens
  misc feature (2538): n equals a,t,g, or c
ctccgttggaaacttgggctgagtaccgcggcgggcgcgagcraggcgccctagacatcttctccctcccttgcctcagatttattgctaaacatgggtgcatttttggataaacccaaaactgaaaaacataatgctcatggtgctgggaatggtttacgttatggcctgagcagcatgcaaggatggagagtggaaatggaagatgcacacacagctgttgtaggtattcctcacggcttggaagactggtcattttttgcagtttatgatggtcatgctggatcccgagtggcaaattactgctcaacacatttattagaacacatcactactaacgaagactttagggcagctggaaaatcaggatctgctcttgagctttcagtggaaaatgttaagaatggtatcagaactggatttttgaaaattgatgaatacatgcgtaacttttcagacctcagaaacgggatggacaggagtggttcaactgcagtgggagttatgatttcacctaagcatatctactttatcaactgtggtgattcacgtgctgttctgtataggaatggacaagtctgcttttctacccaggatcacaaaccttgcaatccaagggaaaaggagcgaatccaaaatgcaggaggcagcgtgatgatacaacgtgttaatggttcattagcagtatctcgtgctctgggggactatgattacaagtgtgttgatggcaagggcccaacagaacaacttgtttctccagagcctgaggtttatgraattttaagagcagaagaggatgaatttatcatcttggcttgtgatgggatctgggatgttatgagtaatgaggagctctgtgaatatgttaaatctaggcttgaggtatctgatgacctggaaaatgtgtgcaattgggtagtggacacttgtttacacaagggaagtcgagataacatgagtattgtactagtttgcttttcaaatgctcccaaggtctcagatgaagcggtgaaaaaagattcagagttggataagcacttggaatcacgggttgaagagattatggagaagtctggcgaggaaggaatgcctgatcttgcccatgtcatgcgcatcttgtctgcagaaaatatcccaaatttgcctcctgggggaggtcttgctggcaascgtaatgttattgaagctgtttatagtagactgaatccacatagagaaagtgatgggggtgctggagatctagaagacccatggtagccttaaaaaccttctaaaatgcttttrattctgaaaattgggggaaaaaacttttaatcacaattttcttcaatacaaggggaaaatattcttgcggattcccaacgttttgtgatatgagcagaaaatcattagcatttcccatcatttgttcatatttgtgttttctgacagttgccacttgtagcattgcctgtactacagtattttttgccaacctcaggcatactcgttacatctgtattgaactttcggccctagaaaccagtggagttatttcaccacaaatcaacaatgtgcctgaggtgcatgggaaatatagttagctatactctgaaaatacattatgttttttttctttaaacaaaacacacaacatgtaagcatgtaagagtaaagaattgtatgatatgttccttttttcagttcaccaagttggaagccttttgcagctctgtggcttggaatttcatttgagcaatttctataggatatgtatttattattgattgttatttaawwwwwttccamttttacctgtattaccaaactgggttctccaataatgtccaaattgtaatgttgccttgcttcaagataaagtgtatttgggaataatattataaacccttmcaaattttatgcatgtatctactgcatccttcaactctcactagaaaatcttttgaaaccaaatggattaatttatggctatttataatttgctttgacatctcactgttggaaattttttaaagatgagatttgcctttataatgtaaattgtgatttttgttttacatgtgggtttctatagttttaattttttcagcttttaagatacgagttttgtgtaatttggtatttttaatcatttatgttattttaaaagctcagaatatcacattgaaattactataaatacatttaaaattatctattttagatctaaggaaatactacagagatattttcatgggttcagtaacttttcattttataacattgggcacggtacagagtgattgtcacataaggtacttgaagatttattagtttaattctatttttacagtaaccttgaattcttctgagttttgcatgtattaaattcaattaatgctgaacatgaagagtaaagtatttatctgaaagaagtttctgggttaggagaagtaatgaatgtatccatttgtacatggtttacatgttgtggatgctttgtaaacattttcctgtatgtttaaattgtgtttcagcaggatgtagttgcccttgtgnaggtt

SEQ ID NO: 315 - DNA, 828 bp, Homo sapiens
  misc feature (828): n equals a,t,g, or c
taattcggcacgmgtcccgggtggagctggctgagtcgcgcgctctgctccacccgacggggctgtgtgtgctgggcctggctcgcggcgaaccgagatggcagagcagtcggacgaggccgtgaagtactacaccctagaggagattcagaagcacaaccacagcaagagcacctggctgatcctgcaccacaaggtgtacgatttgaccaaatttctggaagagcatcctggtggggaagaagttttaagggaacaagctggaggtgacgctactgagaactttgaggatgtcgggcactctacagatgccagggaaatgtccaaaacattcatcattggggagctccatccagatgacagaccaaagttaaacaagcctccggaaactcttatcactactattgattctagttccagttggtggaccaactgggtgatccctgccatctctgcagtggccgtcgccttgatgtatcgcctatacatggcagaggactgaacacctcctcagaagtcagcgcaggaagagcctgctttggacacgggagaaaagaagccattgctaactacttcaactgacagaaaccttcacttgaaaacaatgattttaatatatctctttctttttcttccgacattagaaacaaaacaaaaagaactgtcctttctgcgctcaaatttttcgagtgtgcctttttattcatctactttattttgatgtttccttaatgtgtaatttacttattataagcatgatcttttaaaaatatatttggcttttaaagtaaaaaaaaaaaaaaaaagggggccgccctaaagggtccn

SEQ ID NO: 316 - DNA, 1608 bp, Homo sapiens
ccaggcttttgcaaaaagctatttaggtgacactatagaaggtacgcctgcaggtaccggtccggaattcccgggtcgacccacgcgtccgaggaggaagccgactgctgcctggtctgcaaagaagtcctttcaagtctctaggactggactcttcctaagcaagtccggaagcaccctcactatgtggctctacctggcggccttcgtgggcctgtactaccttctgcactggtaccgggagaggcaggtggtgagccacctccaagacaagtatgtctttatcacgggctgtgactcgggctttgggaacctgctggccagacagctggatgcacgaggcttgaragtgctggctgcgtgtctgacggagaagggggccgagcagctgaggggccagacgtctgacaggctggagacggtgaccctggatgttaccaagatggagagcatcgctgcagctactcagtgggtgaaggagcatgtgggggacagaggactctggggactggtgaacaatgcaggcattcttacaccaattaccttatgtragtggctgaacactgaggactctatgaatatgctcaaagtgaacctcattggtgtgatccaggtgaccttgagcatgcttcctttggtgaggagagcacggggaagaattgtcaatgtctccagcattctgggaagagttgctttctttgtaggaggctactgtgtctccaagtatggagtggaagccttttcagatattctgaggcgtgagattcaacattttggggtgaaaatcagcatagttgaacctggctacttcagaacgggaatgacaaacatgacacagtccttagagcgaatgaagcaaagttggaaagaagcccccaagcatattaaggagacctatggacagcagtattttgatgccctttacaatatcatgaaggaagggctgttgaattgtagcacaaacctgaacctggtcactgactgcatggaacatgctctgacatcggtgcatccgcgaactcgatattcagctggctgggatgctaaatttttcttcatccctctatcttatttacctacatcactggcagactacattttgactagatcttggcccaaaccagcccaggcagtctaaagaaaactgggttggtgcttcttggaatgaaggcaaaaatctgaaattgttagtgtctcagtaatcctgatttagaacccaggctttttgtaacaatgtgttttcttgcctaaattcatttatctggcatcatcagagtactaacatgtttatatttcagatatccaaagcttaccactttaggtgatgaatctttactattttagcccttttttgatgagactatttgtctaaagtgaatcatttgttcttgccttattaaacagagtagatggaaaacaatttaacctattttgaagtcatttctttatgaatatgaataattgttctatgctttaataatctattgtgaggaaactactaagaaatatgttggtgtgtttgtccttacttgaaatgggtctgtattatggtacttttaataaatatttgatttttctttctcttcaaaaaaaaaaaaaaaaaaaaaa

SEQ ID NO: 317 - DNA, 1057 bp, Homo sapiens
  misc feature (958): n equals a,t,g, or c
  misc feature (966): n equals a,t,g, or c
  misc feature (1035): n equals a,t,g, or c
  misc feature (1053): n equals a,t,g, or c
ttaactcaaactctaaagtcttgagtgtttcaaagtcagtcgttacctgtttaaaagcctcagcctttagcttattcctccttcaatacacgggacctttggttaatttggggcaggaaaactcttaaagtaatctctcttgggcagaggccttattgcaccagagggaaaaagtatatacttcatttgctgttactccagttatgccttaaattcatttgcttggtaatcctatcaacgrgcactaacttcttagtatactttaaacacttagttgggtaacactgagattttgttgtcctttattttttgctgagatggagtcagtcagatgttagtcatagctaacaccgaatttgtgttgtcatttagacagttactgattcgatctgctttatatatgagaacgtatttttaactattccaagaaggaagaggtagctaaatgtaatcccctcttcctatccccccagaaaactgaactgtaagttctaggtagactaattgggagcagacacggagttttagatgccttagccaaacccagcagaaacctttcacacagccactcatcgtaagaaacgcagatttttctcttctcatgcttgtctctggttccctgcatttgtagtgacagaactttcactagcaggatataaagaaagtaattatgcttggagtccctctttactgggtttgagttaggtgcataacatggaaaggagtggtgccttcaaatgaatgtgaccactccgtattgtggagtgacttccctagggcatcctatacatcctaccacagaaggccaagggacagagcaccaacttcagtatccaagaaattagatccacaactcttgattttccacactgaggactgtcgcgagtaagttgtaagtttgccgtcttccttctggcttagcaggtgctgcagctgtactctcgactcctgtctgtgnagcgtganyagggaaaatgaggagtggagtctatttccaaaaaaaaatgtggatggagttttttccttaaagtggcnttcattggcccaattccntttt

SEQ ID NO: 318 - DNA, 1336 bp, Homo sapiens
ccgtccggaattcccgggtcgacccacgcgtccgaaagaaaacttcctgaagaacatgccagattttactctgcagaaatcagtctagcattaaattatcttcatgagcgagggataatttatagagatttgaaactggacaatgtattactggactctgaaggccacattaaactcactgactacggcatgtgtaaggaaggattacggccaggagatacaaccagcactttctgtggtactcctaattacattgctcctgaaattttaagaggagaagattatggtttcagtgttgactggtgggctcttggagtgctcatgtttgagatgatggcaggaaggtctccatttgatattgttgggagctccgataaccctgaccagaacacagaggattatctcttccaagttattttggaaaaacaaattcgcataccacgttctctgtctgtaaaagctgcaagtgttctgaagagttttcttaataaggaccctaaggaacgattgggttgtcatcctcaaacaggatttgctgatattcagggacacccgttcttccgaaatgttgattgggatatgatggagcaaaaacaggtggtacctccctttaaaccaaatatttctggggaatttggtttggacaactttgattctcagtttactaatgaacctgtccagctcactccagatgacgatgacattgtgaggaagattgatcagtctgaatttgaaggttttgagtatatcaatcctcttttgatgtctgcagaagaatgtgtctgatcctcatttttcaaccatgtattctactcatgttgccatttaatgcatggataaacttgctgcaagcctggatacaattaaccattttatatttgccacctacaaaaaaacacccaatatcttctcttgtagactatatgaatcaattattacatctgttttactatgaaaaaaaaattaatactactagcttccagacaatcatgtcaaaatttagttgaactggtttttcagtttttaaaaggcctacagatgagtaatgaagttatcttttttgtttaaaaaaaaaaaaaacactgcattaaaaaagtatctgttgcattaaggcacatagtgggattacatcataaacctcccataatttttgtcattctgtgttaaatcatttcagggtttaattttgaaataaaagattaatataaaatgcaacaactttttatattacctattagttttggagttctttatgtttaaaaattcaggtgtaaattttattgccttggataaataaattattgatcctttttaaggcagcagttattaaattggt

SEQ ID NO: 319 - DNA, 496 bp, Homo sapiens
  misc feature (433): n equals a,t,g, or c
  misc feature (439): n equals a,t,g, or c
aattcggcasaggggcgcttctgaaactcatctttcctgatggagcgtttgaaagtgagaatcgagcattgatcaatgtccaaatgctgaacaattcaggattcgctaggggaattattgaagagttccaaaataataatgaccttgagttacaacaaaaatgtattaatgtactaagcacatatgctatgattcagggacaaattgatgcaaataaggagattgggcagttcttcatacaaactttaacacagttgaatgttcgccctgaaattttgatagaaatgacaaattcgcttttccaatttacggggatgcctcttacggctataatggaaccatwtttgtaaggggtgggtttttatcyattctaaargacccagttgtacccaatttgrggcmgcmattccaaatgggtggttaaaaccaaatncccganctwaargaagktgccctggttgctttactacgttgggtagtttcatcactacaaatg

SEQ ID NO: 320 - DNA, 1756 bp, Homo sapiens
  misc feature (1718): n equals a,t,g, or c
  misc feature (1721): n equals a,t,g, or c
  misc feature (1733): n equals a,t,g, or c
  misc feature (1750): n equals a,t,g, or c
gtcgacccacgcgtccgcggcacgcgtgggctgaattgcgcgtggtggccatggcggccagcggggctgtggaaccagggcccccgggggctgccgtcgccccgtcgcccgccccggccccgccgcctgcccctgatcacctgttccggcccatcagcgccgaggacgaggagcagcakcccaccgagatcgagtcgctatgcatgaactgttactgcaatggcatgacgcgcctcctgctcaccaagattcccttcttcagagaaataatagtgagctccttttcctgcgagcactgtggctggaacaacacggagatccagtcggcaggcaggatccaggaccagggagtgcgctacactttgtctgtcarggctctggargacatgaacagagaagtggtgaagactgactctgctgccacaaggattcctgagctagattttgaaattcctgcctttagccagaaaggagctctgaccactgttgaaggattgatcacccgtgctatctctggcctggagcaggaccagcctgcacgaagggcaaacaaagatgctacagctgaaagaattgatgagttcattgtcaaactgaaggagctaaagcaagtagcctcccctttcactctgatcattgatgatccctcagggaacagttttgtggaaaacccacatgctcctcagaaagatgatgccctggtgatcacacactacaaccggacccgacagcaggaagagwtgctggggcttcaagaagaagcaccagcagagaagccagaagaggaagatctcagaaatgaagtgctccmgttcagcacaaaytgcccagaatgcaatgtccccgstcagaccaacatgaagctaatggtggtcttgttcgcctggaagtagatttccttaactccgttttccagaaatccctcactttaaggaggttatcatcatggctaccaactgcgagaactgtgggcatcggaccaatgaggtgaaatctggaggagcagtagaacccttgggcaccaggwtcaccctccacatcacagatgcctcagatatgaccagagacctcctcaagtctgagacttgcagtgtggaaatcccagagctagaatttgaactgggaatggcagtcctcgggggcaagttcaccacactggaagggctgctgaaagacatccgggaactggtgaccaaaaatcctttcacactgggcgacagttccaatcctggacagacggagagactacaggagtttagccagaagatggaccagatcatcgaaggtaacatgaaggcccactttattatggatgatccagcaggaaacagttacttgcagaatgtgtatgcgcctgaagatgatcctgagatgaaggtggagcgttacaagcgcacctttgaccaaaatgaggagctagggctcaatgacatgaagacagagggctatgaggcaggcctggctccgcaacggtagcagtgggtggctcaagggccagcctccagcgctgctctttctgtaggttatttattagtattggatgaaggcgaaggctgggagtgtctttcccaccagcccttgcccatggtggggaggacatctggtctgagtcagagatctgtgcacactttctaaacagcttgtgatgcaagtgtgagcctattgtgttacttgaccttattttggaagttttgaattggcctaggaggaaacccccnganttcagcttgggncttaccaggcttgactngctcaa

SEQ ID NO: 321 - DNA, 588 bp, Homo sapiens
  misc feature (512): n equals a,t,g, or c
  misc feature (543): n equals a,t,g, or c
  misc feature (567): n equals a,t,g, or c
  misc feature (574): n equals a,t,g, or c
gggaggccgaggtgggaggatcactggagctcgggagttcaagaccagcctgggcaacatagtgaaaccgtctccacaaataatttttaaaaaattagccaggcatggtggtgccgcctgtagtcccagctactcaggaggcttgggtgggaggattgcctgagaccaggaggttgaggctgcagtgagccgtgatttcaccaccactccagcctgggtgagaaagcaagaccctatatcaatgaaaaaaaaaaaaaaaaaagaccagctttgcagccagaagccagaggatacccagggacagtagggctcccaggtggctggttctcagcacaccttccatgaatctgcttgctgctgcttcagtgtggtggccatcgtgctgtgtgacaaaccagggctgttcacagyttcctcagccccccagaaggggagttgttcagggaagagacattttagtttcattttgccttgcaattttctttcttccttgcaaggttcttcggtggganttcagttcaccaaaacaaaaggcttaaaccngggtttttttaaggagagggtttnttaaatncccttttgcccgac

SEQ ID NO: 322 - DNA, 738 bp, Homo sapiens
  misc feature (10): n equals a,t,g, or c
  misc feature (15): n equals a,t,g, or c
  misc feature (17): n equals a,t,g, or c
  misc feature (19): n equals a,t,g, or c
gacagtcacngtacngnantcccggtcgacccacgcgtmcgagaagcaggaattcctgaattttatgactatgacgttgccctgatcaagctcaagaataagctgaaatatggccagactatcaggcccatttgtctcccctgcaccgagggaacaactcgagctttgaggcttcctccaactaccacttgccagcaacaaaaggaagagctgctccctgcacaggatatcaaagctctgtttgtgtctgaggaggagaaaaagctgactcggaaggaggtctacatcaagaatggggataagaaaggcagctgtgagagagatgctcaatatgccccaggctatgacaaagtcaaggacatctcagaggtggtcacccctcggttcctttgtactggaggagtgagtccctatgctgaccccaatacttgcagaggtgattctggcggccccttgatagttcacaagagaagtcgtttcattcaagttggtgtaatcagctggggagtagtggatgtctgcaaaaaccagaagcggcaaaagcaggtacctgtcacgcccgagactttcacatcaacctctttcaagtgctgccctggctgaaggagaaactccaagatgaggatttgggttttctataaggggtttcctgctggacaggggcgtgggattgaattaaaacagctgcgacaacaaaaaaaaaaaaaaaaaaaaaaaaaaaaaaaaaaaggggggggg

SEQ ID NO: 323 - DNA, 876 bp, Homo sapiens
  misc feature (61): n equals a,t,g, or c
  misc feature (759): n equals a,t,g, or c
  misc feature (761): n equals a,t,g, or c
  misc feature (786): n equals a,t,g, or c
  misc feature (798): n equals a,t,g, or c
  misc feature (857): n equals a,t,g, or c
agaccagcagctggccgctgggctgtgaacgccagggaccgagcggaagttcccgcccggncgcgatcggtgccgcggcttctgcagggaagtggctacgcgcgtccctcgggaaaagcaggctttgcaaattggcagcccaagtytcaggggcctgtgcagtgactgatcattaccaacatttcgaagtgagagatgtcacataaagagcgtcatttcgagcttctcttgaaaagttgtaaggtgagctaccctgggactgtattcctgaatggcaatgtgatggcagagtcctgcagtattaccacctgaggacttgtgcaccagggttcccacccacccacttcaggcccttggttcagggatgtgcccgtcatggaaataacaggtgctgtggctctgctggttttggctttccttctctgtaaccttccaatatctttctccttccaggtactgtaaaccacttagtaattaattagttaataaattcatctcatcagcacttttaaaataatgtgctaggccacactgtcatggaccccagatatacagcagcaaacaaagcagccatggtaccttccctcagggagcagtcagtccagtggaggagtcagatatgactcaccacacagatcgaaaaatctycacaaattatgagaagaatgctgagggaagaaagaacataggtggacccgctgctgagtccaggcttacttgcagagatctatgctggccaggccctgtgctaggcagcanangacatggaataaaatcaaataaggncactgtgtgcangcaccttacggtgtgggaaaaggaacaagccccattcacagggttttattaatttccancctgtgagaaattgggaac

SEQ ID NO: 324 - DNA, 1322 bp, Homo sapiens
  misc feature (47): n equals a,t,g, or c
  misc feature (1309): n equals a,t,g, or c
aattcggcacgagcggcacgagggaaattgagcggagagcgacgcgnttgttgtagctgccgctgcggccgccgcggaataataagccgggatctaccatacccattgactaactatggaagattataccaaaatagagaaaattggagaaggtacctatggagttgtgtataagggtagacacaaaactacaggtcaagtggtagccatgaaaaaaatcagactagaaagtgaagaggaaggggttcctagtactgcaattcgggaaatttctctattaaaggaacttcgtcatccaaatatagtcagtcttcaggatgtgcttatgcaggattccaggttatatctcatctttgagtttctttccatggatctgaagaaatacttggattctatccctcctggtcagtacatggattcttcacttgttaagagttatttataccaaatcctacaggggattgtgttttgtcactctagaagagttcttcacagagacttaaaacctcaaaatctcttgattgatgacaaaggaacaattaaactggctgattttggccttgcagagcttttggaatacctatcagagtatatacacatgaggtagtaacactctggtacagatctccagaagtattgctggggtcagctcgttactcaactccagttgacatttggagtataggcaccatatttgctgaactagcaactaagaaaccacttttccatggggattcagaaattgatcaactcttcaggattttcagagctttgggcactcccaataatgaagtgtggccagaagtggaatctttacaggactataagaatacatttcccaaatggaaaccaggaagcctagcatcccatgtcaaaaacttggatgaaaatggcttggatttgctctcgaaaatgttaatctatgatccagccaaacgaatttctggcaaaatggcactgaatcatccatattttaatgatttggacaatcagattaagaagatgtagctttctgacaaaaagtttccatatgttatgtcaacagatagttgtgtttttattgttaactcttgtctatttttgtcttatatatatttctttgttatcaaacttcagctgtacttcgtcttctaatttcaaaaatataacttaaaaatgtaaatattctatatgaatttaaatataattctgtaaatgtgtgtaggtctcactgtaacaactatttgttactataataaaactataatattgatgtcaggaaaaaaaaaaaaaaaaaaaaaaaaaaaaaaaaaaaaaagggcggccgctngcgatctagaact

SEQ ID NO: 325 - DNA, 342 bp, Homo sapiens
  misc feature (64): n equals a,t,g, or c
  misc feature (71): n equals a,t,g, or c
aattcggcagagctaaaacagattcaaaccttgaagcagatgaacgagcaactgcaggctgagnacagggncctgacccgagtggtggccagactctcggagtccatcgagtcctcggacacccaggagctctagttctkgcccctactctccaactcacttccctcctccactactccaggcaggttcagtcttcttgttagtcccagaagctctgtgctcatcccctccatccgagcctccatatgcaggttcctgcaaagcttggttatctgcagatggaagcagccaggactgagatcatagaatggggacataccagcctaggtcaagggaggcagt

SEQ ID NO: 326 - DNA, 3690 bp, Homo sapiens
ctgggcgactcctcctcctcctcttctcgccattgcagttggacccagcagcccggcgcgcacgcgtggcttttgggggcagaccccggcgggctgtggcaggagggcggcggcggcggctgcggtcgaagaaggggacgccgacaagagttgaagtattgataacaccaaggaactctatcacaatttgaaaagataagcaaaagtttgatttccagacactacagaagaagtaaaaatgcgtccaatgcgaatttttgtgaatgatgaccgccatgtgatggcaaagcattcttccgtttatccaacacaagaggagctggaggcagtccagaacatggtgttcccacacggagcgggcgctcaaagctgtgtccgactggatagacgagcaggaaaagggtagcagcgagcaggcagagtccgataacatggatgtgcccccagaggacgacagtaaagaaggggctggggaacagaagacggagcacatgaccagaaccctgcggggagtgatgcgggtgggcctggtggcaaagggcctcctactcaagggggacttggatctggagctggtgctgctgtgtaaggagaagcccacaaccgccctcctggacaaggtggccgacaacctggccatccagcttgctgctgtaacagaagacaagtacgaaatactgcaatctgtcgacgatgctgcgattgtgataaaaaacacaaaagagcctccattgtccctgaccatccacctgacatcccctgttgtcagagaagaaatggagaaagtattagctggagaaacgctatcagtcaacgaccccccggacgttctggacaggcagaaatgccttgctgccttggcgtccctccgacacgccaagtggttccaggccagagccaacgggctgaagtcttgtgtcattgtgatccgggtcttgagggacctgtgcactcgcgtgcccacctggggtcccctccgaggctggcctctcgagctcctgtgtgagaaatccattggcacggccaacagaccgatgggtgctggcgaggccctgcggagagtgctggagtgcctggcgtcgggcatcgtgatgccagatggttctggcatttatgacccttgtgaaaaagaagccactgatgctattgggcatctagacagacagcaacgggaagatatcacacagagtgcgcasccgcactgcggctcgctgccttcggccagctccataaagtcctaggcatggaccctctgccttccaagatgcccaagaaaccaaagaatgaaaacccagtggactacaccgttcagatcccaccaagcaccacctatgccattacgcccatgaaacgcccaatggaggaggacggggaggagaagtcgcccagcaaaaagaagaagaagattcagaagaaagaggagaaggcagagcccccccaggctatgaatgccctgatgcggttgaaccagctgaagccagggctgcagtacaagctggtgtcccagactgggcccgtccatgcccccatctttaccatgtctgtggaggttgatggcaattcattcgaggcctctgggccctccaaaaagacggccaagctgcacgtggccgttaaggtgttacaggacatgggcttgccgacgggtgctgaaggcagggactcgagcaagggggaggactcggctgaggagaccgaggcgaagccagcagtggtggcccctgccccagtggtagaagctgtctccacccctagtgcggcctttccctcagatgccactgccgagaacgtaaaacagcaggggccgatcctgacaaagcacggcaagaacccagtcatggagctgaacgagaagaggcgtgggctcaagtacgagctcatctccgagaccgggggcagccacgacaagcgcttcgtcatggaggtcgaagtggatggacagaagttccaaggtgctggttccaacaaaaaggtggcgaaggcctacgctgctcttgctgccctagaaaagcttttccctgacacccctctcgcccttgatgccaacaaaaagaagagagccccagtacccgtcagagggggaccgaaatttgctgctaagccacataaccctggcttcggcatgggaggccccatgcacaacgaagtgcccccaccccccaaccttcgagggcggggaagaggcgggagcatccggggacgagggcgcgggcgaggatttggtggcgccaaccatggaggctacatgaatgccggtgctgggtatggaagctatgggtacggaggcaactckgcgacagcaggctacagtgactttttcacagactgctacggctatcatgattttgggtcttcctagagcgtctaaaagtattgcacacaaaatcaactttttactccaatttcctccaactccaaaacccaaagtgtccgtgctgtgtccctgtgcttcactgggtttctcaaccgtggcttttcaccgcagcttgtctgaaactcttagcctgcagaatttaagacaatggcagtttttatcgtgatttgcctttgaacttggtcctattgaagttcacaataagtggaaaacaattttttcagagaatgtatttttgtgcagaattgcacagaattctagagacagcgttgttcggcatcaaggcaaaagcccacctttgctttttatggaaagcattactttatttaaagagacagacaatgacgcattttaatctacctttgtcttaatttacagcaggttttgtatgaatttttaaccttttaacaaactcccaaatctggttgatgcctttgacagtgatgaaaacgatttcaccacatctgaatccagagaaaccggctttttttcttattgcgagcatgttaaaacgttgggaacatgtggggaattgtatattgcgctgaattaacttctcccgcctcttgtaatgctctggtgggttcttgtttgggaatgcgatattttgtggctggtttagctagagagtgaactctcaaaggtatcaaaactgtgcttccattattagtgcaagaaacagacaggctttaaggggtagatgacgtgaaattttgcaagtcttaattacagctgcagatgcatgggattctggatttttttgttgctttttagtttaatgggactttaaaagtaattgaggagaaagaaccgtgatgttccctgtttctccagtaaaggactggcttttgcttgggcagaggtggtgctgctgggtgtgcagctgccacagactccaaaggcgtagaagtttgtgccaacacacggagtcattctggctctctgctgaggcccctgttttctggcaggtgccctccttggaaactggttttggctctgatcagcggttctttttgcagcaaagcctgcatctgtgttgacttgcaagattttgcgtttattcaggcaaaaactggtcaaaatggttactacatgatttgttcccagaggtttgaaacattcagtgaaactttttaaaactttgattgcatgatgtattttttttttagaaagttattgtttgagaataatgtctttttataccaggaaaatagttatcctgaatgacgttgaaaactccccctcccctttatttttttttaatcaatacatgtgaaagtaacaaaaaaaaaaaaaaaaaaaaaaaaaaaaaaaaa

SEQ ID NO: 327 - DNA, 719 bp, Homo sapiens
  misc feature (446): n equals a,t,g, or c
  misc feature (701): n equals a,t,g, or c
  misc feature (709): n equals a,t,g, or c
aattcggcagagtgcgacctcaacgccaggcggttactttgctgctcctcccgctcgctatgtcaacgtccactagctgcccgattcccgggggccgggaccagctgcccgactgctacagcaccacgccggggggcacgctatacgccactacccccggaggcaccaggatcatctacgaccgaaagttcctgctggagtgcaagaactcacccattgcccggacacccccctgctgcctccctcagattcccggggtcacaactcctccaacagcccctctctccaagctggaggagctgaaggagcaggagacagaggaagagatacccgatgacgcacaatttgaaatggacatctaatccagtgcagatgacctggcatgtggagttacagagggatccctcatgccactgctgccaccacctcttcctggggcatccaanagccagctggcctcatctaatctggaagggagtgacttgttagttccaggcctcctttagttctgaggcagctagaccagggataggagtgggcaacttgccaagcccttaactctacttcctcttcagtctgtggtactcctcctaaccctaaaccctctatgctcaggggctggaactggggaatggagtaagtcaccttctgactgcttagtaaacattcaaagaaaaaaaaaaaaaaaaaaaaaaaacctngggggggnccccgtaccc

SEQ ID NO: 328 - DNA, 989 bp, Homo sapiens
  misc feature (176): n equals a,t,g, or c
  misc feature (943): n equals a,t,g, or c
  misc feature (968): n equals a,t,g, or c
  misc feature (982): n equals a,t,g, or c
  misc feature (984): n equals a,t,g, or c
  misc feature (986): n equals a,t,g, or c
gcggtgcgsaggctctgctcggatcgaggtctgcagcgcattcgggagcatgagtgctgcagtgactgcagggaagctggcacgggcaccggccgaccctgggaaagccggggtccccggagttgcagctcccggagctccggcggcggctccaccggcgaaagagatcccggagntcctagtggacccacgcagccggcggcgctatgtgcggggccgctttttgggcaagggcggctttgccaagtgcttcgagatctcggacgcggacaccaaggaggtgttcgcgggcaagattgtgcctaagtctctgctgctcaagccgcaccagagggagaagatgtccatggaaatatccattcaccgcagcctcgcccaccagcacgtcgtaggattccacggctttttcgaggacaacgacttcgtgttcgtggtgttggagctctgccgccggaggtctctcctggagctgcacaagaggaggaaagccctgactgagcctgaggcccgatactacctacggcaaattgtgcttggctgccagtacctgcaccgaaaccgagttattcatcgagacctcaagctgggcaaccttttcctgaatgaagatctggaggtgaaaataggggattttggactggcaaccaaagtcgaatatgacggggagaggaagaagaccctgtgtgggactcctaattacatagctcccgaggtgctgagcaagaaagggcacagtttcgaggtggatgtgtggtccattgggtgtatcatgtataccttgttagtgggcaaaccaccttttgagacttcttgcctaaaagagacctacctccggatcaagaagaatgaatacagtattcccaagcacatcaaccccgtggccgcctccctcatccagaagatgcttcagacagatcccamtgsccgccaaccattaacgrgntgcttaawgacctccgatctttcgncccaaaaaaaaaangngnatt

SEQ ID NO: 329 - DNA, 434 bp, Homo sapiens
ctccagacgaatagctttccagttcttcttacccagggcttagaaagtaacgattttgaaatgctaaataaagtacttcaaactaggaatgtaaaccttataaagaagactgtattaaggatgcccctgcatactattattccgttgttacaagagcttacaaagaggttacaaggacatcctaatagtgctgtgctaatggttcagtggctaaaatgtgtgttaacagttcatgcatcatacctgtccacgttgcctgacctggtaccccagctggggacactctaccagttaatggaaagcagagtcaaaacttttcagaaactttcacaccttcatggaaagcttattcttctaattacacaagtaacagcatcagagaagacaaagggagcaacttcccctggacagaaggcaaagttggtgtatgaagt

SEQ ID NO: 330 - DNA, 696 bp, Homo sapiens
  misc feature (643): n equals a,t,g, or c
  misc feature (657): n equals a,t,g, or c
  misc feature (685): n equals a,t,g, or c
aattcggcacgagccaccctggacgaagccacccccaccctcaccaaccaaagcccgaccttaaccctgcagtccaccaacacgcacacgcagagcagcagctccagctctracggaggcctcttccgctcccggcccgcccactcgctcccgcctggcgaggacggtcgtgttgagccctatgtggactttgctgagttttaccgcctctggagcgtggaccatggcgagcagagcgtggtgacagcaccgtaggcagccggagaatgcagcccaagcagggcctggcatggggcaggacagggtccagccttttcctaacatctgcctgtgccacaacggccagcaggtgccccatcctctgcccacagcaractctgtcccatggctctccgggcagtagagtgtgtgagtgcagactggacctgtggttcataccttgtcaccacccgggaagctgaaggccacttyctcccagatggcctcagcaggaccatcgmcctttctcagagcagagggccaggtatagaaaccgcagtgggcctgcaagccgcccgagsctycccagcagcctcctacagagcaggaagagggcgccctgttgaaccctgagtgtttgcaggcccagcagaccctgctgttnccaagcgcaccctngctttcgaacattaacttccttaacttngggacagtagg

SEQ ID NO: 331 - DNA, 541 bp, Homo sapiens
  misc feature (181): n equals a,t,g, or c
  misc feature (532): n equals a,t,g, or c
  misc feature (541): n equals a,t,g, or c
ccacggtgtcttctaccacctggccaagaggctcacggggatcacgtacctccgtgtccgcagcctgcccggagaggacctgagggcccgtkttagctacaggctgctgggggtcatctcactgctgcacctggtgctgtccatggggctgcagctgtacggtttcaggcagcggcasgangccaggaaggagtggaggctgcaccgcggcctgtytcaccgcaggcctccttggaggagagagccgtttccagaaaccccctgtgcamcctgtgcctggaggagcgcaggcacccaacagccacgccctgcggccamctgttctgctgggagtgcatcamcgcgtggtgcagcagcaaggcggagtgtcccctcctgccgggagaaagttccctccccagaaagctcatctaccttcggcactaccgcttgaaccggcgcccgggttgggccttggacacaaattgaactctacgggaattctgaaacgcccaagatttattctccaggatttaaccttgcttgccaaaantttaaaacn

SEQ ID NO: 332 - DNA, 305 bp, Homo sapiens
  misc feature (3): n equals a,t,g, or c
  misc feature (54): n equals a,t,g, or c
ggnacggaaaagcgcgagaagcggctcggttcccaccacggagaggcgggagtnagtcaactgacaagcgctggggacagtggcgtccttgtcttgcctttgtcgctcccgccccgctcttccctggctgggctggcggaggccttgctgatgaacctgactgagggtcccctggcgatggcagaaatggaccctacacagggccgtgtggtctttgaggacgtggccatatatttctccaggaggagtgggggcacttgatgaggtcagagattgctgtaccgtgatgtgatgcttgagaattt

SEQ ID NO: 333 - DNA, 445 bp, Homo sapiens
  misc feature (14): n equals a,t,g, or c
  misc feature (409): n equals a,t,g, or c
ggtttgccaaaaantgtttgtacctctgggccatattgcagaaccctgcccttctttgttgactgaggaaagctcgctccctgcccaggtttttcattgttgatcgaaattaacaccaggtggtgaatagagcccctsctaaggttgctcaggataaatcatttattaaataggtctgcttatcaggaggggcgtgaaggctcccaaaaggaaatgctggcacctgggcccagaagccagggccttytaactcctggggttgatttcttcagtgaagttgcaccctacaaagggaatatggccmaagcgggcacttcaactggaaggctgrtatcaggcgrttagacagccatggcatttctggcgtttagtctgggaatgggttggtagaggaggtgggacttatatngagggacttaccagttccccgtttggattttggatg

SEQ ID NO: 334 - DNA, 317 bp, Homo sapiens
  misc feature (100): n equals a,t,g, or c
gaaatcttgtctgttggagaagcaatttttttcaactttgtaacagagacttgacatttttaaattttaaaagatgatggactagactcaagtatttttnaggactgtcccaatcataagtctgaaggatttcagtgcttatcataacatttgacatacagttggcacttggtaggtactgaatcaatgaataggagttattggttgcctattcagaggcttgtgggagttgtcatccccattgcagagagccagttggtgaatcagcaaggtttccatttatgctgctcccctccacccagtcccctggagggact

SEQ ID NO: 335 - DNA, 1524 bp, Homo sapiens
  misc feature (1440): n equals a,t,g, or c
  misc feature (1441): n equals a,t,g, or c
  misc feature (1511): n equals a,t,g, or c
  misc feature (1523): n equals a,t,g, or c
tctcccgggctgcaggaattcggcacagaactgccgactcatcttttcaaaagcaaaaccatctgtattagccttgtgccttctcaatttggaagtggaaactttgaaatctgttgaattactggaaattctcttgctagttaaaaaacattccaagattaatgacactgagttcttctactggagagagttggtttctaaatgcctagccgagtattcttctcctgaatgttgcaaaccagatcttaagaagttggtttggatcgtttcaaggcgcacagcccagaacctccacaacagctactatagtgttcctgagctgccaacgatacctgaggggggttgttttgatgaaagtgaaagtgaggactcttgtgaagatatgagttgtggagaggagagtctcagcagctctcctcccagtgatcaagagtgcaccttctttttcaacttcaaagtggcacaaacactgtgctttccatcttagaaatctgattgttctgtcagaatttatatttacaggtttcaaagcaataaatgggggaataggtagtttcctggtttagcccccatctagtcaggaattaatatactggaatacctaccttctatttgttattcagatcagatctggcctattttcatatttatcctaagccatcaaatggggtagtgcctcttaaaccattaacagtactttagacattggcactttatttttctcgtagatctttagctactttggggaggagggaaggtgctgataccttcaatttgttacttttcaagatttttaaaaataactagtgtagcttatcttaaacattttataaaaccttcagatgtctttaagcagattggaagtatgcaagtgcttccttagcagggacagtggataatccttaatggtttatcatagatttcaccctccccccttctcagaagagtgagtatgctcttaaatgtcaaacacatttttgttgttttgttttttaaatgatcagtgtctatttgatgtgatgcagatcttataaatttgggaattataatattgacatttctgtgatttttatatatgtaatgtcttaattgagatttctgttaaggcagaaataattaggctagggctcttagttttcattcctattgcccaagtattgtcaaactatggtattattttaatgttactttaaaaatccataatctgctagttttgcatgtacttatatgaaaacagtgcagtaagttgaaaactcagtatctatggaattgataaatggtgatctggtgkagatatttatcgcatttcttatattaaaaaatgctgcmtgattacrtttawttccktggaattwcayttcmgaakagggrttgtatatggtgccaagattgaatatgaagaacccgagtgttgagatatagtttaagcaatctggtggnntcagctagatgggctattacttgaatgagattgcaggatttacttataatgttactgaacttaagctaantgtttactgggna

SEQ ID NO: 336 - DNA, 306 bp, Homo sapiens
atatatacgtggcgtaaaatgtacatgaaataacaagtcactactcaaaaagtacattttttttctcctcagagccttattagcaattggcaatcttaaaatttcatctcctaagcagggtccttatcagatattccttgacccccctatgttaagtgtcttagccactcattgttaagccaactgctaaaatcttagaaaaatatttcagccttctcctaccccatcccccacccccacaagcttctagcttcttctacctacagcaaatgttaaaactggtcagaagttatattatttactctg

SEQ ID NO: 337 - DNA, 291 bp, Homo sapiens
atgcaaataaaatcaagtcatagttaaacttgcttatgtcaacgattctgttcttgcaagacctacctggcctcaagagaaattattttccagggcccaacacattggtgttttatcagcacctaattgacctggggaaagcagaatgcctaactccagcctgtggtattttgttatggcaggctgagcagactaatacagactttaatatacagactaaaagtaaagggatggagaaagatacccctagtcaaaataaagaaagtagttatgttaatctaagacagagct

SEQ ID NO: 338 - DNA, 1264 bp, Homo sapiens
ggcacgagtcgcgaccctggtccggacctgacctgaattgcgaccccaacctggactgctcccctgaccgcaacccctacccccgcccaccagtatggcccggcacgtgttcctaacggggcccccaggagttggaaaaacaacattgatccataaagccagtgaggttttaaaatcctctggtgtgcctgttgatggattttataccgaagaagtcagacagggagggagaagaataggattcgatgtcgtcacgttgtccggcacccgggggcctttatcgagagttgggttagagcctccacctggaaaacgtgaatgccgagttgggcagtatgtggtcgacctgacttcttttgagcagttggcactacccgtcttgaggaatgccgactgcagcagtggcccagggcaaagagtgtgcgtcatcgatgagattgggaagatggagctcttcagtcagcttttcattcaagctgttcgtcagacgctgtctaccccagggactataatccttggcacaatcccagttcctaaaggaaagccactggctcttgtagaagaaatcagaaacagaaaggatgtgaaggtgtttaatgtcaccaaggaaaacagaaaccaccttctgccagatatcgtgacgtgcgtgcagagcagcaggaagtgaagacacgtgcattcctgccttccgtgaaggagtgcccagttcaagaggagcctgatggagccctgcctgtcgaggctgtatgcctatggggttatggaaccttgtgggcttttctagagaaaactcaacagctgtttcccataaaatgtttaaaagatcaaattagccttaatgctggattgtctgtacaagattaactatccattgtggcttatctatgcttaaagatttcttgtttatttcctcttgcagtcatgcacatgatttgggtaaactgtgagatgagaaatggttttcagagtattagatggaattcacccccgttgaagtttataaatgtgttcaggggaagcgggaggaaagagttcactgcctaatcagttttgcatgtcatgaaaattaaattcctctccaggtgcagcttcagcctcatgcaacttaaagtgataacagttatttgattttttaaaaaatattattccaaaagaaaaccattttaggtcatctcccccaactctgtttgcttactgcttaataaatataaaaataaatctgatggttacagamarkaaaaaaaaaaaaaaaaaaaaaaaaaaa

SEQ ID NO: 339 - DNA, 759 bp, Homo sapiens
ttcggcactgagggagccatggcggtggcaaattcaagtcctgttaaccccgtggtgttctttgatgtcagtattggcggtcaggaagttggccgcatgaagatcgagctctttgcagacgttgtgcctaagacggccgagaactttaggcagttctgcaccggagaattcaggaaagatggggttccaataggatacaaaggaagcaccttccacagggtcataaaggatttcatgattcagggtggagattttgttaatggagatggtactggagtcgccagtatttaccgggggccatttgcagatgaaaattttaaacttagacactcagctccaggcctgctttccatggcgaacagtggtccaagtacaaatggctgtcagttctttatcacctgctctaagtgcgattggctggatgggaagcatgtggtgtttggaaaaatcatcgatggacttctagtgatgagaaagattgagaatgttcccacaggccccaacaataagcccaagctacctgtggtgatctcgcagtgtggggagatgtagtccagacaaagactgaatcaggccttcccttcttcttggtggtgttcttgagtaagataatctggactggcccccgtctttgcttccctgcctgctgctgccccatttgatcaagagaccatggaagtgtcagagattcagaatccaagattgtctttaagttttcaactgtaaataaagtttttttgtatgcgtaaaaaaaaaaaa

SEQ ID NO: 340 - DNA, 2639 bp, Homo sapiens
  misc feature (37): n equals a,t,g, or c
  misc feature (52): n equals a,t,g, or c
  misc feature (1651): n equals a,t,g, or c
aaatttttgttggaacatcataaacggatcaataccnaaagacacttggaancttcttttagacttcagtacgatgattgcagatgacatgtctaattatgatgaagaaggagcatggcctgttcttattgatgactttgtggaatttgcacgccctcaaattgctgggacaaaaagtacaacagtgtagcactaaaggaaccttctagaatgtacatagtctgtacaataaatacaacagaaaattgcacagtcaatttctgctggctggactgaactgaagatcaatcctcacaattcagactgagggttgagacaaaactttaaggatacatcttggaccatatcgtatttcattcttctaatggtggtttgggcttgtcttctagtctgggccgctctaaacatttataattccaacattgtggatttcatcttatatctgtggaccatcctagtttattctcccataagtcttagaagctttatggtgattattttgaggttttcattctcgcataaagcacaatgctgtcttcatcagaaaacagttggcataagaattaaacatatgaacatcacaaaacaatttataaaaacttcttaaatatacgctttgggctagttgcaaagactatgctaatagcacttccagtgagagtgatatatttaagtgtactggatctggaatggtgttttggtttggggggaatytttttttttcctggcaaatcacatrtgttgttgatgtgagtatctgatgaaaaamcaatgtcagaataaccgacatgaaaattttttaggataacttggtgcctacctgaaaaatgtattgtgttttagactcttgatttcaaaaggttccacagaactagtctgcgcttaccttacccatgtttatatatagctgtcctacagggagcttttatttagaaaatgtctgcataatgttagattcttctcctgtctacattatgcactacataattggacttcattatgcttttgaaatgcttatctgcctgtcacataagttaaactatttaatttgttttgaatgttttggattgctacacaatacaatattctaaatttaggcatgagggtttttttgttttatttttactttttttttgtcatcgcactatggaacacaaatggaattctcttaatttataagaagatagttgcagttaaattttgaaaatggttgtaatgagccatgaagttcaatctttataatataggtactgctctttcagacaaatagtccattttcgatgacttattattttgttgaaattgctttaactgctaatcactgtggttgccaaatatttacttcaggagcaaagattttcaaacaagcatacacgatgcaaaataccaatctggcttctagtctctttactgttttcgtttcactcagattagctcagttttctcatcaaagcagaatgctatcttgtatgtatttttttcattacaagccccatgagctgcttttatgctgaaaatggtcatttccctgttcacttactgacatgtgaagaagggtttcttgctttcttaaacatttccgtaaggcaggctagaaatgtaatacttcaaatgtttgatgattatggtcttttgataggaatagattctncttgggatatatatccaggcactctctaaggtctagggttgatattaacaaaggaatgtacttagaatagcagtacattttatgcaaatatggraattattttaagaaacaatgacatatcaaaactgctttttacatgattttgaaatagactagaaagctttccctatagacatattaatattccaatcataactttaattcaagaatgcagttttaccaaaagaaaaatttgaaaatttctattcaggctactggaattggttattaaaagaaaaaggaaaaagaagaatcttgctgctttcagtatttcctgatttttttgtaaatataaagaggaacttcaattatgaaaaatttttaaaagatatatatatctatatatctatatatatgtactgttttgtttcctgtcttgaagattttgagttatggttattggtttcagattgattaattcacatatgctgtgttttgaaatgagatcccattagctttttttttttttttttttcaatataaagtgttttctttaaaagtcatattggttcgtggcctagtgccttggattttacatatttttytttttaaatgcaaaaccttttcaacaaaatagtgtttgtcatcaggttggtactaaacatttataattactgtgtaattataaacaaaaatacataaagctttgaatataattatgtagcataaaagttaaggttgttcactatgatggcatcttagaattaaacaaaacttttactagggctgaaaagagaagactgatttaatgtggtgtgattattctgaagataaatgtctggctacagggaatattttgtactaaaaaatgattacacatatggctgtgtgtgtttgagtctgtgtctgtgagagagccagagagagtgagagagattgacagagaaagggagagacacacacacgccccttgaaacacttaggagttaaagcaattcaagggtcgagc

SEQ ID NO: 341 - DNA, 1824 bp, Homo sapiens
  misc feature (1807): n equals a,t,g, or c
aaagggttacaagttgctgccaccttatcttagagttattcaaggggatggagtagatattaataccttacaagaggtatgtkttttatattaaaagtttcaataaggcatttcttataattaagtttgtttatgtttgataaagaacacaatataaatacaattttaagtctttgtaagtgtttatgttggtataaatctctgtgcattgcttaaagtttagaaataatagtagtttaaaatacagaggtgccagccaagccatacttactcttccagttgtcattggccaccctgaatgatgaatctaaagaagtatcattgtgaacaagggaaatgtcagtcaagaaatattccttggaatataaaacaaagccttgactctgctggcataggtctgagttttcataaactggagcttcacaaatctgtaaaactcataatattaatgggtgctttttcagaaattatagaatagctgccacctcttctaaattaagcattgactgtcatcagtattagatttagccagatagtataagtgttatgcaggcgtacctcattttattgtgctttgcaaacattgcatttttttacaaattgaaggttgtggccaccctgtgttgagcaagtctgttggtgctatttttccaacatgtattcacttcatgtctgtgtgacacatactggtaaattctcacaatatttcagactttgtcattatatctgttatggtgatctgtgattagtgatcttcgatgttactactgtgattgttttagggcaccacagggcacacccagataaggcagtgaacytaattgataaatactgtgtgtgttgtgactccttcaccagttacccattccctttctctgctcacttcaagtttccctatgccctgagacacaacagtatttaaattaggtcaattaataaccccacagtggcctctgagtattcaagtgaatggaaaagtcacatccctctcattttaaatcaaaacctagacatgattaagtttagtgaggaaggcatgctgaaagctaaaataggcctcttaaggcaaacagtaggccaagttgtgaatgcaaaggaaaagttcttgaagaaaaatcaaagtgctactccactaagcatatgaataagaaagtgaaacagctttattgctgctagggagaaagtttgaatggtctgaatagaagatcaaagcaaccacaacatttccttaggctaaagcctaatccagagcaaggccctcgtttcaattctgtgaagcctaagagaggtgatgaagctgcagaagaaaaattggaagctagcagaggttggttcctgtggtttagggaaagaagccatctccatgagtgcagaatgaagcagcaagtgctgatgtagaagctgctgcaagttacccagaagatctagctaagatcattgatgcagrtgactaaacagattgtcagtgtagaggaaacagccttccattggaagaaggtgccgtctaggactttcataactagagagaagacaacatctgctttgaaaggacatgctaactctcattagtggataatgcagctggtcacttttaagtggaagctagtgctcatttatcattctgataatcctaggacccttagaatttgctgaatctactctgcctgtgctttataaatggaacaacaaagcctggatgacagcatgtctgtttacatcatagtgtactgagtattttaagcccactgttgggaccgactgctcaggaaaaaaaaaaaaaaaaaaaaaaaaaaaaaaaagggcggtncgctcgcgatctagaac

SEQ ID NO: 342 - DNA, 4531 bp, Homo sapiens
  misc feature (30): n equals a,t,g, or c
gggggaaccgaggtggggagtccgccaganctcccagactgcgagcacgcgagccgccgcagccgtcacccgcgccgcgtcacggctcccgggcccgccctcctctgacccctcccctctctccgtttccccctctccccctcctccgccgaccgagcagtgacttaagcaacggagcgcggtgaagctcatttttctccttcctcgcagccgcgccagggagctcgcggcgcgcggcccctgtcctccggcccgagatgaatcctgcggcagaagccgagttcaacatcctcctggccaccgactcctacaaggttactcactataaacaatatccacccaacacaagcaaagtttattcctactttgaatgccgtgaaaagaagacagaaaactccaaattaaggaaggtgaaatatgaggaaacagtattttatgggttgcagtacattcttaataagtacttaaaaggtaaagtagtaaccaaagagaaaatccaggaagccaaagatgtctacaaagaacatttccaagatgatgtctttaatgaaaagggatggaactacattcttgagaagtatgatgggcatcttccaatagaaataaaagctgttcctgagggctttgtcattcccagaggaaatgttctcttcacggtggaaaacacagatccagagtgttactggcttacaaattggattgagactattcttgttcagtcctggtatccaatcacagtggccacaaattctagagagcagaagaaaatattggccaaatatttgttagaaacttctggtaacttagatggtctggaatacaagttacatgattttggctacagaggagtctcttcccaagagactgctggcataggagcatctgctcacttggttaacttcaaaggaacagatacagtagcaggacttgctctaattaaaaaatattatggaacgaaagatcctgttccaggctattctgttccagcagcagaacacagtaccataacagcttgggggaaagaccatgaaaaagatgcttttgaacatattgtaacacagttttcatcagtgcctgtatctgtggtcagcgatagctatgacatttataatgcgtgtgagaaaatatggggtgaagatctaagacatttaatagtatcgagaagtacacaggcaccactaataatcagacctgattctggaaaccctcttgacactgtgttaaaggttttggagattttaggtaagaagtttcctgttactgagaactcaaagggttacaagttgctgccaccttatcttagagttattcaaggggatggagtagatattaataccttacaagagattgtagaaggcatgaaacaaaaaatgtggagtattgaaaatattgccttcggttctggtggaggtttgctacagaagttgacaagagatctcttgaattgttccttcaagtgtagctatgttgtaactaatggccttgggattaacgtcttcaaggacccagttgctgatcccaacaaaaggtccaaaaagggccgattatctttacataggacgccagcagggaattttgttacactggaggaaggaaaaggagaccttgaggaatatggtcaggatcttctccatactgtcttcaagaatggcaaggtgacaaaaagctattcatttgatgaaataagaaaaaatgcacagctgaatattgaactggaagcagcacatcattaggctttatgactgggtgtgtgttgtgtgtatgtaatacataatgtttattgtacagatgtgtggggtttgtgttttatgatacattacagccaaattatttgttggtttatggacatactgccctttcattttttttcttttccagtgtttaggtgatctcaaattaggaaatgcatttaaccatgtaaaagatgagtgctaaagtaagctttttagggccctttgccaataggtagtcattcaatctggtattgatcttttcacaaataacagaactgagaaacttttatatataactgatgatcacataaaacagatttgcataaaattaccatgattgctttatgtttatatttaacttgtatttttgtacaaacaagattgtgtaagatatatttgaagtttcagtgatttaacagtctttccaacttttcatgatttttatgagcacagactttcaagaaaatacttgaaaataaattacattgccttttgtccattaatcagcaaataaaacatggccttaacaaagttgtttgtgttattgtacaatttgaaaattatgtcgggacataccctatagaattactaaccttactgccccttgtagaatatgtattaatcattctacattaaagaaaataatggttcttactggaatgtctaggcactgtacagttattatatatcttggttgttgtattgtaccagtgaaatgccaaatttgaaaggcctgtactgcaattttatatgtcagagattgcctgtggctctaatatgcacctcaagattttaaggagataatgtttttagagagaatttctgcttccactatagaatatatacataaatgtaaaatacttacaaaagtggaagtagtgtattttaaagtaattacacttctgaatttatttttcatattctatagttggtatgacttaaatgaattactggagtgggtagtgagtgtacttaaatgtttcaattctgttatattttttattaagtttttaaaaaattaaattggatattaaattgtatggacatcatttattaattttaaactgaatgccctcaataagtaatactgaagcacattcttaaatgaagataaattatctccaatgaaaagcatgacatgtgtttcaatagaagaatcttaagttggctaaattcaaagtgcttgacatcaaaatgttctagagtgattagctactagattctgaatcagacatcacatctgactagagaccagtttctttcgaatgattcttttatgtatgtagatctgttcttctgaggcagcggttggccaactatagcccaaaggccaaatttggacttctttttataaatgcagattgtctatggctgctttcccactactccagcctaaggtaaacagctgcaatagaagccaaatgagaatcgcaaagcccaaaatgtttattaacctgccctttacacaaaatcacacaaaaagtttcctgatctctgttctaagaaaaggagtgtgccttgcatttaaaaggaaatgttggtttctagggaagggaggaggctaaataattgatacggaattttcctcttttgtcttcttttttctcacttaagaatccgatactggaagactgatttagaaaagtttttaacatgacattaaatgtgaaattttaaaaattgaaaagccataaatcatctgttttaaatagttacatgagaaaatgatcactagaataacctaattagaagtgttatcttcattaaatgttttttgtaagtggtattagaaagaatatgtttttcagatggttctttaaacatgtagtgagaacaataagcattattcacttttagtaagtcttctgtaatccatgatataaaataattttaaaatgattttttaatgtatttgagtaaagatgagtagtattaagaaaaacacacatttcttcacaaaatgtgctaaggggcgtgtaaagaatcaaaagaaactattaccaataatagttttgataatcacccataattttgtgtttaaacattgaaattatagtacagacagtattctctgtgttctgtgaatttcagcagcttcagaatagagtttaatttagaaatttgcagtgaaaaaagctatctctttgttcacaaccataaatcaggagatggagattaattctattggctcttagtcacttggaactgattaattctgactttctgtcactaagcacttggtatttggccatctccattctgagcaccaaacggttaacacgaatgtccactagaactctgctgtgtgtcacccttaaatcagtctaaatcttccagacaaaagcaaatggcatttatggatttaagtcattagattttcaactgacattaattaatccctcttgattgattatatcatcaagtatttatatcttaaataggaggtaggatttctgtgttaagactcttatttgtaccctataattaaagtaaaatgttttttatgagtatcccttgttttcccttcttaaattgttatcaaacaatttttataatgaaatctatcttggaaaattagaaagaaaaatggcaaggtatttattgttctgtttgccataatttagaactcacacttaagtattttgtagttttacattcctttttaacccattcagtggagaatgtcagcttttctcccaagttgtatgttaagtctattctaatatgtactcaacatcaagttataaacatgtaataaacatggaaataaagtttagctctattaaaaaaaaaaaaaa

SEQ ID NO: 343 - DNA, 584 bp, Homo sapiens
aaattgtccgaatgccttatgcccttcctcasagcacccaggattgtgactgactctgcatttttaattcttgaaacttggctttccataacatggtacatgcttcaggactacatatgacccagagagcaaggtggctgaactatagtctggaagccctcaggtaaagaggcacatctcaccactcattggttaaacaatgcatcatagcgagcacttttcctttccctggagaatgggatgtgaagcagtagaccgcagccacgccgatggttatacagtgaagaagacttcacctcttcctattgagtttgcttggaatgctgacagcatcaggcaactctgaactgaacatttgctttgtcagaaaatatctttttttttactttgaagtttggcaaccttcatgttaccccaaagcaaaaccattgtgtcaggagtcaaacaaatgtttagaaagcaaacatgacgtctctattgtacaacctcctttctcttggctgtttaaaggatgtacttcgtgtattaaagggtactttatgttgaagtaaaaaaaaaaaaaaaaaaaaaaaaaaaaaaaaaaa

SEQ ID NO: 344 - DNA, 778 bp, Homo sapiens
  misc feature (35): n equals a,t,g, or c
ggcacaggggattacaggcatgtgccaccatgccnggctaattttgtatttttagtagagacggggtttcgccatgttggtcagactggtcttgaactcctgacctcaggtgatccgcccgcctcagcctcccaacgtgctgggattacaggtgtgagccaccgtacctggyagaaaatgtactttctttctcagaaatacttttaaaaaaaattgaagggtgaggagaaaaacatcttggagaagaggacccattaaaactttaaatatctgtgggaaccatttttcctgattttcccttttttaacatcatggcaaagatgggtttttttccaacaaaatttaatttaatatctttccacttgaagattttaggtttgttttcaatacttaatgaatataaaactaaaggagaaaagccaacctgaaataatttaaactttatatgaacatttcgataagagtttgtggattttttctgtagataatatatttgatccrgaactcaagtgcatggaaacatgattttgatttttaaaatctaaaaaaaaaaaaaattaaaatcatgcttccctctattgcagtatcagttatttagtcacagaatggtattttatgtaaattaaaattaggtgaatgcaatgcaggtaactggttttggaatgggaatgtgcagtgctttatgtttggggagttggagcagggtatcttttcatcaattagaaggaaartttgaaacttctgattacctttatgttgggttcccctattatttgtc

SEQ ID NO: 345 - DNA, 3740 bp, Homo sapiens
  misc feature (223): n equals a,t,g, or c
gggctgctcgctgcatctctgggcgtctttggctcgccacgctgggcagtgcctgcctgcgcctttcgcaacctcctcggccctgcgtggtctcgagctgggtgagcgagcgggcgggctggtaggctggcctgggctgcgaccggcggctacgactattctttggccgggtcggtgcgagtggtcggctgggcagagtgcacgctgcttggcgccgcagtgnatcccgccgtccactcccgggagcagtgatgttgggcaactctgcgccggggcctgcgacccgcgargcgggctcggcgctgctagcattgcagcagacggcgctccaagaggaccaggagaatatcaacccggaaaaggcagcgcccgtccaayaaccgcggacccgggccgcgctggcgkkactgaagtccgggaacccgcggggtctagcgcacagcagaggccgaagacgagacgggttgcaccccttaaggatcttcctgtaaatgatgagcatgtcaccgttcctccttggaaagcaaacagtaaacagcctgcgttcaccattcatgtggatgaagcagaaaaagaagctcagaagaagccagctgaatctcaaaaaatagagcgtgaagatgccctggcttttaattcagccattagtttacctggacccagaaaaccattggtccctcttgattatccaatggatggtagttttgagtcaccacatactatggacatgtcaattgtattagaagatgaaaagccagtgagtgttaatgaagtaccagactaccatgaggatattcacacataccttagggaaatggaggttaaatgtaaacctaaagtgggttacatgaagaaacagccagacatcactaacagtatgagagctatcctcgtggactggttagttgaagtaggagaagaatataaactacagaatgagaccctgcatttggctgtgaactacattgataggttcctgtcttccatgtcagtgctgagaggaaaacttcagcttgtgggcactgctgctatgctgttagcctcaaagtttgaagaaatataccccccagaagtagcagagtttgtgtacattacagatgatacctacaccaagaaacaagttctgagaatggagcatctagttttgaaagtccttacttttgacttagctgctccaacagtaaatcagtttcttacccaatactttctgcatcagcagcctgcaaactgcaaagttgaaagtttagcaatgtttttgggagaattaagtttgatagatgctgacccatacctcaagtatttgccatcagttattgctggagctgcctttcatttagcactctacacagtcacgggacaaagctggcctgaatcattaatacgaaagactggatataccctggaaagtcttaagccttgtctcatggaccttcaccagacctacctcaaagcaccacagcatgcacaacagtcaataagagaaaagtacaaaaattcaaagtatcatggtgtttctctcctcaacccaccagagacactaaatctgtaacaatgaaagactgcctttgttttctaagatgtaaatcactcaaagtatatggtgtacagtttttaacttaggttttaattttacaatcatttctgaatacagaagttgtggccaagtacaaattatggtatctattactttttaaatggttttaatttgtatatcttttgtatatgtatctgtcttagatatttggctaattttaagtggttttgttaaagtattaatgatgccagctgtcaggataataaattgatttggaaaactttgcaagtcaaatttaacttcttcaggattttgcttagtaaagaagtttacttggtttactatataatgggaagtgaaaagccttcctctaaaattaaagtaggtttaggaaaacagaccctcaaattctgacattcattttcctaagcaactggatcaatttgctgacttgggcataatctaatctaagcatatctgaatacagtattcagagatagatacagtagagattccccagactttttcgctctttgtaaaacctgtttgtttaggttttgcgaggtaaactcaacagaggttgggagtggaagagggtgggaagcttatatgcaaattaacagacgagaaatgctccagaaggtttattattttaaagcacattaaaaacaaaaaactatttttaaaatcctgctagattttataatggatttgtgaataaaaaatacccagggttctcagaatggaataaatatcccttttaatagttatatatacagatatacaactgttagctttaattggcagctctcttcttttttcttcttttcactggctttttacttggtgctttttcttgttttgcactggtggtctgtgttcttattttctttggattcttgtctggttccaaaatgatcatttcttcttcttcactatctgagagtattatgggagcatcttggcttccaatatcagagacttctactccagtgtccatttttataccatcaagaatgatagcttgatcaccaccgccttcatcatcttccttctcagagtcttcaagatcaccccaggagttttctactccctctccaatttgggcagttccaggagtccatagcacaggtgtagaaacaacttctgaaggaggttctgcttcagcaatgatttcttctgctttttcttctacatccgaggtatcaataggggccttttccattttaaatgctgtgatcctttgcatttgctatagactctgcaaaaccaaactttccaccttctttccttactttttggtcattctccaaagctttcaatattagctctgtaatttctgctactttcacaccagcgattttactgcatctcagaacttgatcttttagtagcattatcccaccactggactggatagtacaaatctctcgatgtttgttcatggcaatcaccagcaagccatccatcacacgttcttctcgttcattgggatccaccaataaatatgttccttgctggaaaaaggcaaaactgacacaaatgggcatgtggtggatacttaatggtacaggatcacgctcttcaggtgtatacagtgttacttcatctccttggacagagacatcaggtcttcggaaatgacataaggccacgattgcagcaatgctggcagcatcaataatatttccatcatgatttaataaatgtaggtctacacgtatttgccaaaccttttcaccagcaacaacacagagagactcagtgtctatacacttcgaatttcttagacatctttccatgagtcgattcaacttcaccaagagatctgactgcctgccaggttcgaaagctggagcggccatctgagagagttcaaggttaaaaaaaagaataccttctgttgcccgattgagttttggagacacaagttcacaggaaacctgtccaagaactcttgtttttccaagttccacaatgcagcatccgtaatctgttccaaatgagatcctgatgttcctataatcataggtttgtctgccatccagccgcttcttctcttcgatggcacggagtaggaagcggcgttcgcagtttgagagtggcgtttccttcatggtgttgggtcaccggccccacaggcaccagaatccgcgggaaaaacggaacccgatctttccttgcgcgccgctgctcgcctcgtgcc

SEQ ID NO: 346 - DNA, 446 bp, Homo sapiens
  misc feature (376): n equals a,t,g, or c
  misc feature (408): n equals a,t,g, or c
  misc feature (427): n equals a,t,g, or c
  misc feature (442): n equals a,t,g, or c
ctttatcataaagactgcagttggcgccgggcaggagggcacactacagtgtatgtacgtacctcagccctcaccctgaatctaccaagagctcctgggaatcagtaagaaggctgccatgacgtccagcgtgtccctcacaggaaaggcctccacccagccagcaaatgcggcagggatgcctggctttgccaaagagtgaaagcctccccagtgggatctgccgtagcgcacaggggagcagacggagccgcggcgcaggggcagcgggacctcagccaccgctggagagagcggatgttctgaacgtttcccctggacgctgcctgccacaccagtggaagctgagttcatgctgtaagacttggctgttcantgagtcattcgagattcacagaagcacttacnttgttcaccagaggacaantggtgccggtgttanccca

SEQ ID NO: 347 - DNA, 782 bp, Homo sapiens
  misc feature (769): n equals a,t,g, or c
  misc feature (772): n equals a,t,g, or c
cggacgcgtggggcctccggagccatggcggcggcactgaagtgtctactgacattaggaagatggtgccccggccttggagtggctccccaggcccgggcgctcgccgccttagtacccggagtgacccaggtagataacaagtccggtttcctgcagaagaggcctcatcgccagcaccctggcatcctaaagctgccgcacgtgcgctgccacaggcactggctaacggtgcccagttattgctacttgggagcgctgggcccactatggagaatcaggtgcaaacactgaccagttatctctggagcagacatttgcctgtagagccagaggagttgcaaagacgggctaggcatcttgagaaaaaattcctggaaaacccagacttatctcagacagaggagaaacttcgtggagcagtgctacacgcactacgtaaaactacctaccattggcaagaactgagctacactgagggactgagcctggtgtatatggcagcaagactggatggtggctttgcagcagtctccagagcattccatgagatccgggctcgaaatccagcatttcagccacaaactttgatggactttggctcaggtactggtctgtcacctgggctgstcacagtatttggggccagagcctacgtgaatatatggtgtggacagataacttgcatgtggtttgcagaaaactctgaaaggggtyaaattgggagcctatattcagggctttttaamagttctactgrtaaccaagngantttgatgata

SEQ ID NO: 348 - DNA, 439 bp, Homo sapiens
  misc feature (145): n equals a,t,g, or c
  misc feature (175): n equals a,t,g, or c
  misc feature (369): n equals a,t,g, or c
  misc feature (420): n equals a,t,g, or c
ggccatgttggcaggctggtcttgaactcctggcctcaagtgatacccccaccttggcctcctaaagtgctgggattacaggcatgagccatgactcccagcctaatgttcagaaattttgtgagctggctgttgaaccataggnatctttaaattgtggcagtattagtactgntacaaatcagggttcacccttgtctgttgggtaccattttcccctcttgcctcctgttatattcacattttctacaactggagaattgatgggatctgaagggcaaatgtattttctctttggccaccgtggatttcctgtactctgtgtgtttttaatgaaagagagtttgtgaagcaacttacagacatggnttatttgaaagctcttctgttttattaaaatagaggttcagaaagcagttntgtatttcattcagagtcc

SEQ ID NO: 349 - DNA, 2356 bp, Homo sapiens
gcgcctgcaggtcgtacaacagtggatccaaagaattcggcagaggcccggctgcctgtggctcttggctgtggctctcctgccatggacctgcgcttctcgggcgctgcagcatctggacccgccggcgccgctgccgttggtgatctggcatgggatgggagacagctgttgcaatcccttaagcatgggtgctattaaaaaaatggtggagaagaaaatacctggaatttacgtcttatctttagagattgggaagaccctgatggaggacgtggagaacagcttcttcttgaatgtcaattcccaagtaacaacagtgtgtcaggcacttgctaaggatcctaaattgcagcaaggctacaatgctatgggattctcccagggaggccaatttctgagggcagtggctcagagatgcccttcacctcccatgatcaatctgatctcggttgggggacaacatcaaggtgtttttggactccctcgatgcccaggagagagctctcacatctgtgacttcatccgaaaaacactgaatgctggggcgtactccaaagttgttcaggaacgcctcgtgcaagccgaatactggcatgaccccataaaggaggatgtgtatcgcaaccacagcatcttcttggcagatataaatcaggagcggggtatcaatgagtcctacaagaaaaacctgatggccctgaagaagtttgtgatggtgaaattcctcaatgattccattgtggaccctgtagattcggagtggtttggattttacagaagtggccaagccaaggaaaccattcccttacaggagacctccctgtacacacaggaccgcctggggctaaaggaaatggacaatgcaggacagctagtgtttctggctacagaaggggaccatcttcagttgtctgaagaatggttttatgcccacatcataccattccttggatgaaacccgtatagttcacaatagagctcagggagcccctaactcttccaaaccacatgggagacagtttccttcatgcccaagcctgagctcagatccagcttgcaactaatccttctatcatctaacatgccctacttggaaagatctaagatctgaatcttatcctttgccatcttctgttaccatatggtgttgaatgcaagtttaattaccatggagattgttttacaaacttttgatgtggtcaagttcagttttagaaaagggagtctgttccagatcagggccagaactgtgcccaggcccaaaggagacaactaactaaagtagtgagatagattctaagggcaaacatttttccaagtcttgccatatttcaagcaaagaggtgcccaggcctgaggtactcacataaatgctttgttttgctggtgatttaaccagtgcttggaaaaatcttgcttggctatttctgcatcatttcttaaggctgccttcctctctgagtacgttgccctctgtgctatcaatcatcttatcatcaattattagacaaatcccactggcctacagtcttgcttctgcagcacccactttgtctcctcaggtagtgatgaattagttgctgtcacaaaaggagggaagtagcacccaaattaaattgcttaagagaggaaatgtacatcttgtataacttagggagcgaagaaaatgtaggcgcgaaagtgaaaagtgaggcagctagttcttcctattccattctcgaccaacctgccctttcttaatatgactagtggtcttgatgctagagtcaacttactctgttgctggctttagcagagaataggaggaaccatatgaaaaagatcaggctttctgacttccatccccaaaacacatttaccagcatactccaaactgtttctgatgtgttccatgagaaaaggattgtttgctcaaaaagcttggaaaatactacacactccctttctccttctggagatcaacccacattagagtgtctaaggactcctgagaattcctgttacagtaaacaaaactaacgtaatctaccatttcctacactatttgagcatggaaatcatagtccccactctgtgaaaacttaacgctttttggaagacatttctgtagcatgtcagtttggagaaatgatgasctacgccttgatgaaagaaccgtgttggtgctgctaagtttagccattatggtttttcctttctctctcttaagccttattcttcaactaaaagatgaggattaagagcaagaagttgggggggatgtgaaaataattttatgaggttgtctaaaataaagagtagtttcttaaaaaaaaaaagttgacgccgccggattttatgaagaagtattcgc

SEQ ID NO: 350 - DNA, 1219 bp, Homo sapiens
ggaggttctctgtcaagagcttacagctaacatagtgaaattagaaaagtgatattctttggattagaaacacatgggatcctgccgccttcttttgtgtttcttcccactctcccgctggcctggccgggacaccacattctgtaaccagggaactgaaaacagaagagcttgttcacagcaggcaaacagcctcagatacaaaataacttacagaagttgcttgagaatggtgactgatcgaccagattgcttgggccatcggaatacctcatgtttccctttgaagaaggtgcttcctgaggcgttttgtttgagtgcaccctgctggtcagaggtgcaagcagatgagaatccagacattgcatgtggaggtctccagctcaggaaagtggggagggaaataattttggttcttgtgcaataaaagttgaccttgactctctgaggaagattttgctgcttttgcctgaagaaaacagacccatctctggaggtctcaggaagggcccagcgaacacactctcttggataattaccacgatggcgtcagcaaacactccaccctgtgcctttttagtccttcccgccctcctgcctctcccttacacccctcttaacgactttcaaactaaaggatacatcatatactgacaaactcaatgtggtcctttcaagaattagccatgagtctcaaaaaggcaataaatggctctaagtggacaggtttgcttcaaacaagtaacatctacattttgtcttttttttttcagttctcctgttatgttctggttgaaatcacctgtgtgtcttaatttctcaattcctttttggcaagaatatcaagcaaggtgaatttaacattatgtttatgttttgttttgttgctgtaactaatagttaattggactgattcttacccagcccyggtcaagaatctgtgaggcatgtgactgaagtactaaattaaacttattttgaaaccaaacctaatttttaagccaaaaggtgtaatagtgatttaatacaggatgaaaaacactgaatttttaagactgtaggtggactatgttagtagttttcaagcaggatgtctgtattcagcattcaataatgctaaaatccctttcagcatgaaatttgtatgtttttatcctttgctgactaaaataaaataactggtggtttgctaaaaaaaaaaaaaaaaaaaaactctgcc

SEQ ID NO: 351 - DNA, 408 bp, Homo sapiens
  misc feature (392): n equals a,t,g, or c
  misc feature (397): n equals a,t,g, or c
  misc feature (405): n equals a,t,g, or c
gcccacgcgtccggggttctttctagagtacggcagcaagttgtcagattccctagttgaatttgctttggacatcagtgtgaagcagaactgatatgccacttgaattaataaaggaagtcaatggggtgcctgaagttcagccgctgagtaaattacataaagtagatttcggatccctacagccagggttacaattatagcaagaaatatattcagggaaaacttycacttatctcttctttaacttatcgtggaaataaaacarctgttttgcagattggactacaargacaccattgcagtggctagatttattgkttttttagcttcttcatctacaagcagagatggtaaaccttgcatatttttgaaaagcatttgaagacctnaaatnaactggtnatg

SEQ ID NO: 352 - DNA, 1283 bp, Homo sapiens
gcacggcgcagtgaatacaagaaaggggcactattttaacacaaccttttcccgtgatcaccaccgaaaattactgacgagtcaatcacctcagatctctcaagcagtccagcctacgcaacagtactccacctctgcgcctgtgcggggagggtaaggcggggccagcaacttcctcagctggagggagagcgcacggtggagccgccagttgagaaggactctgatccggctcagctttccaatcagctgcggaaggagccacgctttcgggggttgcaagatggcggccaccagtggaactgatgagccggtttccggggagttggtgtctgtggcacatgcgctttctctcccagcagagtcgtatggcaacgatcctgacattgagatggcttgggccatgagagcaatgcagcatgctgaagtctattacaagctgatttcatcagttgacccacagttcctgaaactcaccaaagtagatgaccaaatttactctgagttccggaaaaattttgagacccttaggatagatgtgttggacccagaagaactcaagtcagaatcagccaaagagaagtggaggccattctgcttgaagtttaatgggattgttgaagacttcaactatggtactttgctgcgactagattgttctcagggctacactgaggaaaacaccatctttgcccccaggatacaattctttgccattgaaattgctcggaaccgggaaggctataacaaagctgtttatatcagtgttcaggacaaagaaggagagaaaggagtcaacaatggaggagaaaaaagagctgacagtggagaagaagagaacaccaagaatggaggagagaaaggagctgatagtggagaagaaaaagaggaaggaatcaacagagaagacaaaactgacaaaggaggagaaaaagggaaagaagctgacaaagaaatcaacaaaagtggtgaaaaagctatgtaaggtatacagggaacagcactctagaagctatgactcaattgagactacaagtaccacggtgctacttgcacagacccctttggttaaatgtaaattcttgtacaattgaaggatacgcagaaggacatctttctagtctaacagtcaggagctgctctggtcattcccttgtatgaactggtctaaagactgttagtggggtgttagttgatttttcctggtatactgtttcttggctgacactactggtcaagtaagaaatttgtaaataaatttcttttggttcttattatctaaa

SEQ ID NO: 353 - DNA, 3229 bp, Homo sapiens
aggaagaaccggaaaaaaggctcgacgctaccgtgtatgaggaactttgatccttgcgggccaccattccggaagtagaatttagaggaagaaaataccggagttgcagggtataggtaaatttctcaaggttataggttggggttcttagaactttttgtggtgtgtgttggcctagagcgactcagaagcgttagtgagcttcacctaaaaaagctaacctctctgctgagcgcgaccggtatgcggcgcaggatgagcctcagggcttctgttaagagtctgtctgagaaagccggtctgcgctgttcctcggtggcgaccttaattatgagatgagctaatgctttactgacttaaccatggcgcacggggcagtgtggctcataagccacgaaccgggaactccactttgtggcaccgtgagattctccagacggtatccaactgttgaaaaacgagccagagtcttcaatggagcaagttatgtgcctgttcctgaagatggtccctttcttaaagcactgctctttgaacttagattattggatgatgataaagacttcgttgagagtcgtgatagctgttcacgcatcaataaaacatccatttatggactcctgataggaggtgaagaactctggccagttgttgcttttctgaagaatgacatgatatatgcttgtgttccactagttgaacaaactctgtcccctcgtccgccactaattagtgtcagtggagtttcacaaggctttgaatttctttttgggatacaggattttctttattcaggtcaaaaaaatgactctgagctgaatacaaaattgagccagttgcctgacttgcttctgcaggcttgtccatttggtactttattagatgccaacttacagrattcatagataataccaattttgcatctgtgactcagccacagaaacagccagcttggaaaactgggacgtacaaaggaaaaccacaagtttctatttctatcactgaaaaggtaaaatccagcaatatgataaacagggtatagcagatacatgggcaagttgttggaacagtgacttgcaagtgtgatttggaaggaatcatgccaaatgttaccatcagcttgagtctccccaccaakggatctccacttcaggatattctagttcacccttgtgtaacttctcttgactctgcaattctgacttctagtagtattgatgcaatggatgactctgcatttagtgggccttacaaatttccattcactccacctttagagtcattcaacttatgcttctwcacttcccaggtccctgtcccaccaattttgggtttttatcaaatgaaggaggaagaagtacaactaagaataaccattaatttaaaacttcatgaaagtgtgaaaaataattttgaattctgtgaagcccatatacctttttacaatagaggtccaattacacatttggaatacaaaactagttttggccagcttgaagtatttcgagagaaaagcttattgatctggattattggccagaagttcccaaaatcaatggaaattagtctttctggaactgtaacttttggagccaagagccatgagaagcagccatttgacccaatttgtactggagaaacagcatatttaaagcttcattttaggatcttagattacacacttactggatgttatgcagatcagcattcagttcaagtttttgcatcaggaaaaccaaaaataagtgcacaccggaaactaatttcttctgattattacatctggaattctaaagcccctgctccagtaacatatggatcattattattgtaatagtctcatgtttaaatgggattatataatgataacagtttaaagaaaatcataatcttatatttttaatgtggatgcatataacctgtgagtgaaaaatcactgaatgatttaattgtaaaagtagtcttatgtggtgtttgtagtctgatagagcttgaaaggacattttaaaagctaatgtctccaattttgttaaccttcgattttatgccagtataattcagaacatagaaaagtaatgattcacttgggctcattttagactggtcctgggtcaccctgccacacttgtttcctagtgtttctgtggcagacattgctaatcaattacagcccttttctgtactgagccttggataaagggtcaggctcctttttagttcagagattcaggcagccactcccagtgggttgtagataatgtgcaagataaaaactattttctcttccaaatctaagtactaagctcctagtataaggtgttgttacagaataccagagaccatgttagagacaactacatctcttcaaaaaacagccaacagagacaaaggaaaagtgtttaaatagtaagctgttcttcttaatcagaactatcctattgactaataaataatctgcataattctacttaaggtgtgtaatctctgttctagagttagtttttaagtaagcttgttaatctgccactttgacattttgcttaggatgtcagtagccatattaagatgtgtagaataccttcagaagatgatcatagtgttttgtaatcatttaatgtctgcagccaaatttttaaaggtaatttagacctaatactgctcttgctgtgtcttattaagttaaaattaatgaatgaattctggtaaaaattcaaaaggcactctgtgagtagagagtatcatttaagcttattttagtcacatgtagtatatatctccttaaagctgtcactctcactttcttaccattctcttgatttcttcagaaaccatctagtcatcatctttatactctacctgcttctgcaattatatatcatattatgttttcagagcagttcattgtcaagttggactttaagtgaccattcaagaaaagatgaaatctcacgaacctcaaaacttcattcatgtctttttacaaatgagaaaaaaaaatgcattaaagattaatactcaatttgattatatcttgggttctgttttttaatgagtgttctaaggaaaagcttagaaaagctgctaactcctcagaagaaagcatgatagtttaaaggtatagggcatataaatttaggatttgaaatatgattttttaattaaggtcagtcctactcataaactcattttctgcaaagcattatcatggcataaggttctatgttcaaac

SEQ ID NO: 354 - DNA, 506 bp, Homo sapiens
  misc feature (470): n equals a,t,g, or c
  misc feature (505): n equals a,t,g, or c
gcccacgcgtccgcccacgcgtccgcccacgcgtccgagaagttgcttagtcatgtctggccgtggtaaaggtggaaaaggtttgggtaagggaggrgctaagcgtcatcgcaaggttttgcgcgataacatccagggcatcactaagccagctatccggcgccttgctcgtcgcggcggtgtcaagcgaatttctggccttatctatgaggagactcgyggtgttctgaaggtgttcctggagaacgtgattcgtgacgctgtcayttacacagagcacgccaaacgcaagaccgtgacagcaatggatgtggtctacgcgctgaagcgacagggacgcactctttacggcttcggtggctaaggctcctgcttgctgcactcttattttcattttcaamcaaargcccttttcagggcsgccamttttttcataaaagagcaagacatcttgktatcctgctttggtncaaaattttgctgagaagaagtactgggcacatgng

SEQ ID NO: 355 - DNA, 742 bp, Homo sapiens
  misc feature (80): n equals a,t,g, or c
cttacctgtttttccagctcacccactgccagcagagaatgctgtccagtttcaacgagtggttttggcaggacaggttntggttaccacccaatgtcacgtggacagagctagaagaccgggaatggccgtgtctacccccacccccaggacttgttggcagccctgcccctggcgctggtcctcctggccatgcgccttgcctttgagaagattcattggcctgcccctgagccggtggakgrgtgtgagggatcagaccaggaggcaagtgaagcccaacgccacgctggagaaacacttcctcacggaagggcacaggccaaggagccccagctgtctctcctggccgcccagtgtggcctcacgctgcagcagacccagcgatggttccggagacgccggaaccaggatcgaccccagctgaccaagaagttctgtgaggccagctggaggtttctcttctacctgtcctccttcgtgggcggcctctcggtcctgtaccacgagtcatggctgtgggcaccagtaatgtgctgggacaggtacccaaaccagactctgaagccatccctgtamtggtggtamctcttkggagctgggtttctwacytctcawtgyttaatcaggtgcctttgatgttcaagcgcaaggattttcaaggagcaggtkgatacamcattttgkggcggttcattcctgattgaactttttcttacagttgccaacttgttgcggattt

SEQ ID NO: 356 - DNA, 1695 bp, Homo sapiens
  misc feature (24): n equals a,t,g, or c
gcccacgcgtccgcccacgcgtcngcccacgcgtccggtagttttctctgcgcgtgtgcgttttccctcctccccgccctcagggtccacggccaccatggcgtattaggggcagcagtgcctgcggcagcattggcctttgcagcggcggcagcagcaccaggctctgcagcggcaacccccagcggcttaagccatggcgcttctcacggcattcagcagcagcgttgctgtaaccgacaaagacaccttcgaattaagcacattcctcgattccagcaaagcaccgcaacatgaccgaaatgagcttcctgagcagcgaggtgttggtgggggacttgatgtcccccttcgaccagtcgggtttgggggctgaagaaagcctaggtctcttagatgattacctggaggtggccaagcacttcaaacctcatgggttctccagcgacaaggctaaggcgggctcctccgaatggctggctgtggatgggttggtcagtccctccaacaacagcaaggaggatgccttctccgggacagattggatgttggagaaaatggatttgaaggagttcgacttggatgccctgttgggtatagatgacctggaaaccatgccagatgaccttctgaccacgttggatgacacttgtgatctctttgcccccctagtccaggagactaataagcagcccccccagacggtgaacccaattggccatctcccagaaagtttaacaaaacccgaccaggttgcccccttcaccttcttacaacctcttcccctttccccaggggtcctgtcctccactccagatcattcctttagtttagagctgggcagtgaagtggatatcactgaaggagataggaagccagactacactgcttacgttgccatgatccctcagtgcataaaggaggaagacaccccttcagataatgatagtggcatctgtatgagcccagagtcctatctggggtctcctcagcacagcccctctaccaggggctctccaaataggagcctcccatcttccaggtgttctctgtgggtctgcccgtcccaaaccttacgatcctcctggagagaagatggtagcagcaaaagtaaagggtgagaaactggatctccttggccagggaatccgccctctcttttagagcctcgttcttcttttccagctctttgcactcaccagtaagagcctcctgctccgccctcttcttctggcggtacctagtggctgctgtcttgttttgctccatttttttcagcttcttatccagtttctcaccctttacttttgctgctaccatcttctctccaggaggatcgtaaggtttgggacgggcagacccacagagaacacctggagatgggaggctcctatttggagagcccctggtagaggggctgtgctgaggagaccccagataggactctgggctcatacagatgccactatcattatctgaaggggtgtcttcctcctttatgcactgagggatcatggcaacgtaagcagtgtagtctggcttcctatctccttcagtgatatccacttcactgcccagctctaaactaaaggaatgatctggagtggaggacaggacccctggggaaaggggaaagaaggaaggaaaaaaaaaaaaaaaaaaaaaaaaaaaaaaaaaaaaaaaaaaaaaaaaaaa

SEQ ID NO: 357 - DNA, 928 bp, Homo sapiens
  misc feature (928): n equals a,t,g, or c
gctgcgcgcgggcgagctgccgcggagcacccggcaggggctgacagcatggcctcgcccgacccgcccgccaccagctacgccccgtccgacgtgccctcgggggtcgcgctgttcctcaccatccctttcgccttcttcctgcccgagctgatatttgggttcttggtctggaccatggtagccgccacccacatagtataccccttgctgcaaggatgggtgatgtatgtctcgctcacctcgtttctcatctccttgatgttcctgttgtcttacttgtttggattttacaaaagatttgaatcctggagagttctggacagcctgtaccacgggaccactggcatcctgtacatgagcgctgccgtcctacaagtacatgccacgattgtttctgagaaactgctggacccaagaatttactacattaattcggcagcctcgttcttcgccttcatcgccacgctgctctacattctccatgccttcagcatctattaccactgatgcacaggcgccaggccaagggggaaatgctctttgaaagctccaattattggtccccaaaagcagcttccaacgtttgccatctggatgacaaacggaagatccactaaaacgtccacgggattaacagaacgtccttgcagactgagcgatgacaccacactttgtttggacatttaaattcactctgctgaataggaggaagcttttctttttcctgggaaaacaactgtctcttggaattatctgaccatgaacttgctcttctagacaactcacatcaaagccctcactccactaatggagaatcctagccccactaatgccaagtctgtttggggrttttgcctcagctatgggcttccctagagtaggtctaggggaatatcartccgatctttttttttgttttgttttn

SEQ ID NO: 358 - DNA, 1374 bp, Homo sapiens
  misc feature (1360): n equals a,t,g, or c
  misc feature (1374): n equals a,t,g, or c
ggtcgtgggtgggaattgtcgcctaagtggttccgggttggtggatgaccttgagccctcaggaacgagatggcggttctctggaggctgagtgccgtttgcggtgccctaggaggccgagctctgttgcttcgaactccagtggtcagacctgctcatatctcagcatttcttcaggaccgacctatcccagaatggtgtggagtgcagcacatacacttgtcaccgagccaccattctggctccaaggctgcatctctccactggactagcgagagggttgtcagtgttttgctcctgggtctgcttccggctgcttatttgaatccttgctctgcgatggactattccctggctgcagccctcactcttcatggtcactggggccttggacaagttgttactgactatgttcatggggatgccttgcagaaagctgccaaggcagggcttttggcactttcagctttaacctttgctgggctttgctatttcaactatcacgatgtgggcatctgcaaagctgttgccatgctgtggaagctctgacctttttgacttcatactttgaagaattgatgtatgcctctttgcctctgctttgtcatgccattaagctcacaataaggaagaaataacagataagtccattggtggacagccttcttctcttaatcacaagattattttcagaatttaatctttgaggaaaaggtttgagaggaattatatctaagttgtgagactgagttctatattctggtgagttaatggggttgcctcccagcttcttataagactcacagtataactaaacatgatatatcagcttttgcctttcaatttatcaatctcttaaagagaatccaactttattacgattagtatatgatcaaacttccatatttgccttgggaataatggacaaagggaaatactcttaattcatgaataaaaactttgcagaaaattagacagtgtttaattttcgaaaacttccctctctagacagtagataccacctactgatggttacatatactagggaaattttaaaattaggaaatgctgatagctcatattataaatttctaaatcctaggaagaaacgcttggagtgcttctgaatatacagaagttccatttaagggcaagtttccccgtagatgtatcaaaatactaccaactgtaaattgagatttaattcccaaatgtattctacttgttctaaaacaatctgtccacaaatataaaactataagtaataaattgttattttcgcacaatgggaatctctaatgtgaaaatgtattctatgaaaataatttttttaaataaaatgttatataataaaaaaaanaaaaaaagaaaaan

SEQ ID NO: 359 - DNA, 4152 bp, Homo sapiens
  misc feature (65): n equals a,t,g, or c
tgggtctctcacggatctcggcctgagggtgtgggggagaaggcctggacagcctcagggcaggntgtgttttcccaccagccgcagagagccaggatggacgttcctcggacggacggttttcctgcttgggaatgttcctgggctgtgagatccactcttctgggcaggtggttagcacctaacgtttttccctcacttccccccaaattcttaagtcctttggtccatttcactgctcggaccttgagacaacagtcattctgcctgagtctgtcttcagagagacgccccccgtggtcaggcccgcagccccggagaggcccaggagccagaggagctggcacggcgacagcgacggcacccggagytgagccagggtgaggytgtggccagcgtcatcatctaccgcaccctggccgggctactgcctcataactatgaccctgacaagcgcagcttgagagtccccaaacgcccgatcatcaacacacccgtggtgagcatcagcgtccatgatgatgaggagcttctgccccgggccctggacaaacccgtcacggtgcagttccgcctgctggagacagaggagcggaccaagcccatctgtgtcttctggaaccattcaatcctggtcagtggcacaggtggctggtcggccagaggctgtgaagtcgtcttccgcaatgagagccacgtcagctgccagtkcaaccacatgacgagcttcgctgtgctcatggacgtttctcggcgggagaatggggagatcctgccactgaagacactgacatacgtggctctaggtgtcrccttggctgcccttctgctcaccttcttcttcctcactctcttgcgtatcctgcgctccaaccaacacggcatccgacgtaacctgacagctgccctgggcctggctcagctggtcttcctcctgggaatcaaccaggctgacctcccttttgsctgcacagtcattgccatcctgctgcacttcctgtacctctgcaccttttcctgggctctgctggaggccttgcacctgtaccgggcactcactgaggtgcgcgatgtcaacaccggccccatgcgcttctactacatgctgggctggggcgtgcctgccttcatcacagggctagccgtgggcctggaccccgagggctacgggaaccctgacttctgctggctctccatctatgacacgctcatctggagttttggtggcccggtggcctttgccgtctcgatgagtgtcttcctgtacatcctggcggcccgggcctcctgtgctgcccagcggcagggctttgagaagaaaggtcctgtctcgggcctgcagccctccttcgccgtcctcctgctgctgagcgccacgtggctgctggcactgctctctgtcaacagmgacaccctcctcttccactacctctttgstacctgcaattgcatccagggccccttcatcttcctctcctatgtggtgcttagcaaggaggtccggaaagcactcaagcttgcctgcagccgcaagcccagccctgaccctgctctgaccaccaagtccaccctgacctcgtcctacaactgccccagcccctacgcagatgggcggctgtaccagccctacggagactcggccggctctctgcacagcaccagtcgctcgggcaagagtcagcccagctacatccccttcttgctgagggaggagtccgcactgaaccctggccaagggccccctggcctgggggatccaggcagcctgttcctggaaggtcaagaccagcagcatgatcctgacacggactccgacagtgacctgtccttagaagacgaccagagtggctcctatgcctctacccactcatcagacagtgaggaggaagaagaggaggaggaagaggaggccgccttccctggagagcagggctgggatagcctgctggggcctggagcagagagactgcccctgcacagtactcccaaggatgggggcccagggcctggcaaggccccctggccaggagactttgggaccacagcaaaagagagtagtggcaacggggcccctgaggagcggctgcgggagaatggagatgccctgtctcgagaggggtccctaggcccccttccaggctcttctgcccagcctcacaaaggcatccttaagaagaagtgtctgcccaccatcagcgagaagagcagcctcctgcggctccccctggagcaatgcacagggtcttcccggggctcctccgctagtgagggcagccggggcgkcccccctccccgcccaccgccccggcagagcctccaggagcagctgaacggggtcatgcccatcgccatgagcatcaaggcaggcacggtggatgaggactcgtcaggctccgaatttctcttctttaacttcctgcattaaccctgggccgtggttcctamgcccgaggctcccttcccttccccagccgcactcatgccctgctcctgtcttgtgctttatcctgccccgctccccatcgcctgccgcagcagcgacgaaacgtccatctgaggagcctgggccttgccgggaggggtactcaccccacctaaggccatctagtgccaactccccccccaccattcccctcactgcactttggacccctggggccaacatctccaagacaaagtttttcagaaaagaggaaaaaaagaatttaaaaaaggatctccactcttcatgacttcagggattcattttttttatacgctggaaattgactcccctttcccttcccaaagaggataggacctcccaggatgcttcccagcctctcctcagtttcccatctgctgtgcctctgggaggagagggactcctggggggcctgcccctcatacgccatcaccaaaaggaaaggacaaagccacacgcagccagggcttcacacccttcaggctgcacccgggcaggcctcagaacggtgaggggccagggcaaagggtgtgcctcgtcctgcccgcactgcctctcccaggaactggaaaagccctgtccggtgagggggcagaaggactcagcgcccctggacccccaaatgctgcatgaacacattttcaggggagcctgtgcccccaggcgggggtcgggcagscccagcccctctccttttcctggactctggccgtgcgcggcagcccaggtgtttgctcagttgctgacccaaaagtgcttcatttttcgtgcccgccccgcgccccgggcaggccagtcatgtgttaagttgcgcttctttgctgtgatgtgggtgggggaggaagagtaaacacagtgctggctcggctgccctgaggttgctcaatcaagcacaggtttcaagtctgggttctggtgtccactcacccaccccaccccccaaaatcagacaaatgctactttgtctaacctgctgtggcctctgagacatgttctatttttaaccccttcttggaattggctctcttcttcaaaggaccaggtcctgttcctctttctccccgactccaccccagctccctgtgaagagagagttaatatatttgttttatttatttgctttttgcgttgggatgggttcgtgtccagtcccgggggtctgatatggccatcacaggctgggtgttcccagcagccctggcttgggggcttgacgcccttccccttgccccaggccatcatctccccacctctcctcccctctcctcagttttgccgactgcttttcatctgagtcaccatttactccaagcatgtattccagacttgtcactgactttccttctggagcaggtggctagaaaaagaggctgtgggcaggaaagaaaggctcctgtttctcatttgkgaggccagctctggcttttctgccgtggattctccccctgtcttctcccctcagcaattcctgcaaagggttaaaaatttaactggtttttactactgatgacttgatttaaaaaaaatacaaagatgctggatgctaacttgatactaaccatcagattgtacagtttggttgttgctgtaaatatggtagcgttttgttgttgttgttttttcatgccccatactactgaataaactagttctgtgcgggtamaaaaaaaaaaaaaaaaaaaaaaaaa

SEQ ID NO: 360 - DNA, 1156 bp, Homo sapiens
  misc feature (49): n equals a,t,g, or c
ggtccgagacacagtcgtgggcaccatgggcctgaaggccacgggccgnctctgcaccgtggctaaggcaagggggctgcgagcctgcaggggagagctgagggacaccatcctagactgggaggactccctgcccgaccgggacctggcactcgccgatgagccagcaggaacgccgacctgtccatcacgctgggtacatcgctgcagatccggcccagcgggaacctgccgmtggctaccaagcgccggrkaggccgcctggtcatmgtcaacctgcagcccaccaagcacgaccgccatgctgacctccgcatccatggctacgttgacgaggtcatgacccggctcatgaagcacctggggctggagatccccgcctgggacggcccccgtgtgctggagagggcgctgccacccctgcccgcccgcccacccccaagctggagcccaaggaggaatctcccacccggatcaacggctctatccccgscggmcccaagcaggagmcctgcgcccagcacaacggctyararcccgccagccccaaacgggagcggcccaccagccctgccccccacagaccccccaaaagggtgaaggccaaggcggtccccagctgaccagggtgcttggggagggtggggctttttgtagaaactgtggattctttttctctcgtggtctcactttgttacttgtttctgtcccygggagcctcagggctctraragctgtgctccaggccaggggttacacctgccctccgtggtccctccctgggctccaggggcctctggtgcggttccgggaagaagccacaccccaraggtgacagctgagcccctgccacaccccagcctctgacttgctgtgttgtccagaggtgaggctgggccctccctggtctccagcttaaacaggagtgaactccctctgtccccagggcctcccttctgggccccctacagcccaccctacccctcctccatgggccctgcaggaggggagacccaccttgaagtgggggatcagtagaggcttgcactgcctttggggctggagggagacgtgggtccaccaggcttctggaaaagtcctcaatgcaataaaaacaatttctttcttgcaaaaaaaaaaaaaaaaaaaaaaaaaa

SEQ ID NO: 361 - DNA, 376 bp, Homo sapiens
  misc feature (35): n equals a,t,g, or c
  misc feature (371): n equals a,t,g, or c
  misc feature (374): n equals a,t,g, or c
  misc feature (376): n equals a,t,g, or c
tgggaagtgatatttgggagctaattgaggcctanggtgaaaaaggaaatagcttcagatwaaaaytagaaagaagctttctgagaaactgctttgtgatrtgtgcattcatctcacagaggtaaatctttcttttgattcagcagtttggaaacctggctaacatggtgaacccggtgtctactgaaaatacaaaaaattagccaggtgtggtggcacaatgctgtaatcccagctactcaggaggctgaggcaggagaatcgcttgaacccgggaggtgggaggttacagtgagccaagtttgtgccactgcattccagcctgggcttatagagtgggacttccgtcttcaaaaaaaaaaaaaaaaaanctngn

SEQ ID NO: 362 - DNA, 519 bp, Homo sapiens
  misc feature (517): n equals a,t,g, or c
ccctaagccatttttgaagagaggacctgccctagctttatgacttaagaccatgactatgcatcttaagttgcccctctgactgggcagctttctcctgaacacagtgaggaatgctaagttacatggtccagtaamtgagtggataccctgagcccccgcatcccactggctgctatgcagggataagtccatgcacctgtggatggcagtggttgagctggttctctataaaagtatccagtgcccagacctttgttcacacatgcatgtaaatttactgggaaaactctagagaccaatgttctttcttccacagaaatctggcctagcagtctattcttaaattgctctttgtgtgtaagacacatctgtttgataccccactctgccctgacttttaggcaaatccgttaggacaggaaccactattttctttccttccctttgaatcatcttttaaagcagcagaggcaatgttkggcagaggtccacattgggaaagttagtgcatcanga

SEQ ID NO: 363 - DNA, 1385 bp, Homo sapiens
  misc feature (1320): n equals a,t,g, or c
  misc feature (1340): n equals a,t,g, or c
  misc feature (1350): n equals a,t,g, or c
  misc feature (1360): n equals a,t,g, or c
acggtcggattcccggtcgacccacgcgtcaggacggctccggaccgcgcagttagcgccgcctggcctgggccggacccggtcagggttctcaagctgtcgtccctatggggctgtgttttccttgtcccggggagtccgcgcctcccacgccggacctggaagagaaaagagcaaagcttgcagaggctgcagagagaagacaaaaagaggctgcatctcggggaattttagatgttcaatctgtgcaagaaaagagaaagaaaaaggaaaaaatagaaaaacaaattgctacatccgggcccccaccagaaggtggacttaggtggacagtttcataaagcataacatgagtagaagaatctactgccaataactgtttattatctgcaatcaagtgggcttcatcaatttaatttcttctctttgagtaaatgaagattcagactttgtaatattattgcccttaagtgcaatgctaaaaaaacgttgattttcaagcttagagaatggctagacttttcattaaatactgattttcctacatttgctcttctgcagttagtgggtgatttgctatttttcttagtagttaaaaaatggaactaaatagtgaatatacatacactgcatgtaaacattctgcatatacctctaagattaaaattcgcagttgtcttttcatcctttataaaatgatctaactacttatatttgtgctgcatcgcgttacatctgtttttatttcactatgaagatgtttgattaaacttatggacttagtgcctttaaactgatcatcagggagaatcttgaaaaaatcatttgaagggctgatgtgaaggagcactgtaaatttttataacttagtaatgagtattcttaggcagatgtaaaattttttccaatttatttttatttatgtagcttataaaattaacataccctgttttactttatgataaaggattttttgtttgctgaatttaaaattatatattagtgataccatcagagggcagtgatgttctattgtatattaaattcagctctgtaaggatctttgtagtaattgaatgagttaaactaataatctggatgggttataatgagtagtaatatatttgtccatatttcataagtagtgktaatcttgkgkacttattagaggaacgatcataaggatttatacaggatgtggaaactgcggaaggcaagttatkgaatgtatgraaaaaaacatgtagggtactgkactttaccaaaagggtctacttccaggatattaaaaatattaggggtaattctattaccatgccnaggtccttaacccttaaccnttttgttccntagggaaccnggattttatggccttttttggtttc

SEQ ID NO: 364 - DNA, 977 bp, Homo sapiens
  misc feature (6): n equals a,t,g, or c
  misc feature (25): n equals a,t,g, or c
  misc feature (962): n equals a,t,g, or c
aacaanacctccataaccttccccnaaatgaaaacccccccaaagtataagccgccatattttccggatatttttggtggaattccccaaaagggaaatccacagggctgttccgaaatattgggggaacactgtttttcctgcatcatcctgcatttgctccccaagcaatgtagaggtgtttaaagggccctctgctggctgagtggcaatactacaacaaacttcaaggcaagtttggctgaaaacagttgacaacaaagggcccccatacacttatccctcaaattttaagtgatatgaaatacttgtcatgtctttggccaaatcagaagatattcatcctgcttcaagtcagcttcagaaatgttttaaaagggactttagctctggaactcaaaatcaatttattaagagccatattctttaaaaaaaaaaaagctggataatattmtctgtaatatttcagtcctttacaagccaaatacatgtgtcaatgtttctagtatttcaaagaagcaattatgtaaagttgttcaatgtgacataatagtattataattggttaagtagcttaatgattaggcaaactagatgaaaagattaggggcttccacactgcatagattacacgcacatagccacgcatacacacacagacacacagatgtggggtacactgaacttcaaagcccaaatgaatagaaacacattttctggctagcagaaaaaaacaaaacaaaactgttgtttctctttcttgctttgagagtgtacagtaaaagggattttttcgaattatttttatattattttagctttaattgtgctgtcgttcatgaaacagagctgctctgcttttctgtcagagatggcaagggctttttcagcatctcgtttatgtgtggaatttaaaaagaataaagttttattccattctgtgtgaatggtttgagcagtgngaaaaggacaaaaaa

SEQ ID NO: 365 - DNA, 964 bp, Homo sapiens
gttcggcacagaaagggagatgggtagcatcattttgattaacatttggggcctgataggggaaatggtgaagcaatggaaaagaacagacaactaatgatttgcttctatgtccagaatattttacctttaaaaaaatgtcattggcaccataaataaggactgtgagagactgtttaaaagctgtgaaagtctgaaacctataagccaaggtgttccctgcctaaacttattgctgttcccacaaaggactaagcctgttcataagttaccaaagttgccattttggagatggaaattgacgaggagggaaggtcttttattggagagtatacagtacaagcagatcattctgccttagaggtgctaattcccgaaattagaagaccctttcttttccagtaacgaagttataaatatcagcttgttcatccaagccactggctgaggtgttaggaagaggaagagggtggtagaggaggtaagacagtagggaaagacaagggcccatgctcttagtggggaaaactcttggagccgtttactttgagctttgaacactgaaaccattgttggcagggttcagtcactgacagcacaagtttcactgaattgatccaagagtttagtgatttcaaaagccttggtctcaggagaagattaaactttcatattgggcagtggttcactttaaaacacacacatacacacacaaaacaattttttaagaaatcctaataagtaacatacccaaaatgctctgtcttgagtcatgagaaccatcagttcttgatattgtctagacttgcatctagagctacgttgtaaaattcttttaggcatgtgttagatttctgtgtaaactttgtttaaatgtaaacttcatactacattgtcagtttttgtcttaataaaactatagatttataaaaaaaaaaaaaaaaaccgcggggggggggcccgg

SEQ ID NO: 366 - DNA, 1297 bp, Homo sapiens
gtggcttacgcctgtaatcccagcactttgggaggccgaggcaggcggatcacgaggtcaggagttcgagaccagcctgaccaacatggcgaaaccccgtctctactaaaaatacaaaaattagctgggcgttatggcgggcgcctgtaatcccagctacttgggaggctgaggcagaagaatcgcttaaacccaggaggcggaggttgcagtgagctgagatcatgccattgcactccagtctgggcgacaggagcaagactctgtctcaaaaaaaaaaatcattctttttagtcttagcacctacttaaggatccacttttagggctcacccacatttgtttctagatttacccctgcgctagagtaagcactttatctccagaactgagagcaaagttaacaaatctcaccccttctctcctgcaaattagtggacagactccctggaacatgtttggggcttccacctagggccacctagtggtatctctgggtctttacttggtcagatgtttattctacattgttccccaggaacagagtatgagctcattgatgcagaccgattctaattgccaggccctaatttgcagactaactctcataataaacagaggcccatagttgtttatgaactgcttatcccttaaaggagcacaagaacccctccctgccctccttgggcaccctgcctccaggagatggaggcacgtgataagacaaaagactgcaccaactcaccctgacacagttacatagtcactgagagtggggaagatgggacagcccacatgctgcataagatgggccttatgcagcaggcccaggtcgtcattaaggagtgacccctttcctgtaacctgcactttgggatggtagaagtttctttacctgctgacaggtttggtggcactgctggttacccctgggccctgaatggagctaaaatcacatttggtaccagcagcacctatcccaagtgtgatccttcatcccaacactccctcttggagctgttccctgggtagagctagcatgccagcagcttctgcaggctccaaacccaggccagaagccagacccaggcctgctgcctgcatctgcattccctccttccagtgttccttagaacagacatttaggtatctcaggtcctttctaagtgtccctttcctatgtatgcatttcctttttttgtctttactatgcactttagcttataaagccaattaaaaacgatgattgagaaaaaaaaaaaaaaaagggcggcgctcttagaggatccaaagcttac

SEQ ID NO: 367 - DNA, 785 bp, Homo sapiens
  misc feature (704): n equals a,t,g, or c
  misc feature (746): n equals a,t,g, or c
  misc feature (753): n equals a,t,g, or c
gcggctggtttcttggtgagcccgggtccctcaaggccggaaagaaagtcgggcttctctagcccctggaggactcgactcactggtgcgcgatttaggtccggagaggcgttgtgaggtgagctttttcagaagcgcgatcccaggacacgtcgggaagcaagcatccccagagctgcttggaaagaggaccaaagacgtctaaaaagtcatttggaaatatctctaaatatttgttaccatgtataagctgctaaagagaaattgggcccaacaaaactaattgaataattgaggcagatttgtgtgtatcatcaaattctatccagaagttgaagaatctgaatttaaagattgtgtgcatttaataagaggatgacctttcagtttaatttcactatagaagaccatctggaaaatgaattaacacccattagagatggagctttgaccctggattcctcaaaagagctgtcagtctcagaaagtcaaaaaggagaagagagggacagaaaatgttctgcagaacaatttgacttgcctcaggatcacttgtgggaacataagtcaatggaaaatgcagctccctctcaagacacagacagtccactcagtgcagccagcagttcaaggaacttgggagccacatgggaaaacagccctccttgagagctggccaaaggrgcmtgctatgccttaaaggntttaaagaagrtgtttaggaaaatwaaagtycttaggaaacntttaccngggttttccmgyctgtttaagttwttcrgtta

SEQ ID NO: 368 - DNA, 920 bp, Homo sapiens
ggcagagctcatgccatcacagtatctgttgcaaatraaaaggcactagctaagtgtgagaagtacatgctgacccaccaggaactagcctccgatggggagattgaaactaaactaattaagggtgatatttataaaacaaggggtggtggacaatctgttcagtttactgatattgagactttaaagcaagaatcaccaaatggtgttctgtggctgtggagatgagagcaggatcccagctgggacctggatatcagcatcacgcacaacccaagcgcaaaaagccatgaactgacagtcccagtactgaaagaacattttcatttgtgtggatgatttctcgaaagccatgccagaagcagtcttccaggtcatcttgtagaactccagctttgttgaaaatcacggacctcagctacatcatacactgacccagagcaaagctttccctatggttccaaagacaactagtattcaacaaaccttgtatagtgtatgttttgccatatttaatattaatagcagaggaagactccttttttcatcactgtatgaattttttataatgtttttttaaaatatatttcatgtatacttataaactaattcacacaagtgtttgtcttagatgattaaggaagactatatctagatcatgtctgattttttattgtgacttctccagccctggtctgaatttcttaaggttttataaacaaatgctgctatttattagctgcaagaatgcactttagaactatttgacaattcagactttcaaaataaagatgtaaatgactggccaataataaccattttaggaaggtgttttgaattctgtatgtatatattcactttctgacatttagatatgccaaaagaattaaaatcaaaagcactaagaaatamaaaaaaaa

SEQ ID NO: 369 - DNA, 834 bp, Homo sapiens
  misc feature (533): n equals a,t,g, or c
  misc feature (831): n equals a,t,g, or c
cctagaacgctttgcgtcccgacgcccgcaggtcctcgcggtgcgcaccgtttgcgacttggtacttggaaaaatggacaaggattgtgaaatgaaacgcaccacactggacagccctttggggaagctggagctgtctggttgtgagcagggtctgcacgaaataaagctcctgggcaaggggacgtctgcagctgatgccgtggaggtcccagcccccgctgcggttctcggaggtccggagcccctgatgcagtgcacagcctggctgaatgcctatttccaccagcccgaggctatcgaagagttccccgtgccggctcttcaccatcccgttttccagcaagagtcgttcaccagacaggtgttatggaagctgctgaaggttgtgaaattcggagaagtgatttcttaccagcaattagcagccctggcaggcaaccccaaagccgcgcgagcagtgggaggagcaatgagaggcaatcctgtccccatcctcatcccgtgccacagagtggtctgcagcagcgganccgtgggcaactactccggaggactggccgtgaaggaatggcttctggcccatgaaggccaccggttggggaagccaggcttgggagggagctcaggtctggcaggggcctggctcaagggagcgggagctacctcgggctccccscctgctggccgaaactgagtatgtgcagtaggatggatgtttgagcgacacacacgtgtaacactgcatcggatgcggggcgtggaggcaccgctgtattaaaggaagtggcagtgtcctgggaaaaaaaaaaaaaaaaaaaagaaaaaaanaaa

SEQ ID NO: 370 - DNA, 947 bp, Homo sapiens
tggcaatagaatagctggatacactaatctctacaaggtgtcaggcaggagattcaccgttccccagtcccaggggcaggagagaaatctgtaaagggacagatgcaccatctttatttcaaaagaaaaagctccctcagattgtgttactaggagtctcttttgtgacatttactgasctttctccccaatcttaccttcctattggctactttttaaataaaaataaacattttaggctaatatgacaaaaatgagataaaatcttaaaaacattgtactagtgtacagttactaaaatgtgcttactacaaaacagtaaaatatttcactctgtaaatcatcactaagtagttattctgtcctgttgattatgagcctccaaaaatgtttaatgcttgamggatggtttgggaggcagggaatccttwtcttaaaacractktaatgaggcatatgttacatatcataaaacacccatktcaagtgtacatytcagtgattttagtaacttccctcagtggtgtagctgtarctattactcagttytagawcatktttatccccccaataagatcttcatgctcwkttacagttaacctgtgcttaccccagcaacactaatctacttctctataaattgcctttctggcagtcaatcatggaatcatcatagtggccgtggtctggcttgtactagaatgtttgaggttgtcagcagtacgtctggactgtcgatatgcggggaacggtgtgtggccattgctgcgggcttacatggtcatctgtctacgactcgcgtgctatggacgtggtcaaaccatcgggagcgtctccgcgtcgagttttgcttgtgtaggggcactggtgcagtttggtgggagaggccggtccccggggaaactctggagactttgcgagagccgctctagcgccccctggtggct

SEQ ID NO: 371 - DNA, 2340 bp, Homo sapiens
  misc feature (316): n equals a,t,g, or c
  misc feature (2301): n equals a,t,g, or c
ggcacagcaggaactccaggttctgctggccgtggcatcctctctccargtctgctcccttaccggagctasgataasgtagcatgartgacacctgagattagaggctggggctcactgcaggctgtggagaggtcatgctggtccacaggaacacttggcagtgctctcgtagacccctcggtgatgtggaatggacaggtgcctcgcaagagagcaagcacgttcataacaaaacagcaacacaaagacatgttaagcatgtttatttatttgcctgtttttgtttttttacttgagctgtggtcacagctgnccaggtacctaagcaagtcagttgggtacagcaggacacgccaccattccagggtagctggtaccgccagaaacaggagtgggtcttgtcctgttgcaggcacactgcagtggttttcctgcagctctccaacaaacgcctgagtcacaggccagagctgccttggtatgttgttaagtccaaaacttcttctctgggctacctatcttccttcatgaagcaggtgctcaggacccggaagaatcatctacctcccagctttgtgagacagaaccaagtaaaaggaaacatgctagaaaacgtgcctagagaagacacttcaacctttgccttatccaacccctcttcagagaaaggtgtcccatggccccaaaaagaactgccaagttttggtgaggagtaacaccctggcatgacattccttctctttcctggccctcaaccacttccttcctttggctcttaagacctagcaggttctgtgaactctcaggccttggccagcactagttaggggaggtcaggtggtcaatgtcctggtgattttatgagactgccccactgagaaaacttacttacttcaggcatccagtgcccccacccagggttcaggccctgtctaaggtgttgcttaaagacaaaaaggcaacatgtgcctcactggtggtgtgccactgttctcatgctgcctcctaagtgactccgattttcagccctggtagaataaggaagacagctgatgcctccttagccccttagcacatgttcctaaggtgtgttgtcaagccaacctgaattctgcctccctgttatagtccctgtctcccccacagagacctgtgggtgctcccagcagagttgagactggctccgttgagttaatgactagaatatagtgctttcactacttgattgttaacctgttttcttctgatgccatcagtaccagcagtcagactattccactggttaagtgtttactaccattaaagcgaggcatgaagcaaagagctgagtgagtcctctgctctccagaggaccaagaaatacctgtgtgacacagacccacttcagtgtgtacagcaaattctatagtgcttctgagcccagcagggctttacctgcccctggagagttttagccgtcttgtgtttcttgtttacttcacaaccaaatttgtcccctcttctctctgttaagggagagaagtcactttagctggataatacctatgtaacaaactgagcagctgttatttgggcaaaatcaaaggaagaaagagactatggtcttctatttattgtgggaaggaaaacagggtggggcgggtgagtgaaaaggtggaaatccctggtaccttgcctggtggttacacagtttaaccataggccaattttaggggcctctgaagtatctttctacaaacgcagacaagctccactacccctaacctgccaggatgctcaagtccactgtcacaatccctttcagaaaacattagtggccgctgccccagctacagagacggccgaaatgctttcactccttagctttgccaactccatcctccaaaacttcccagaatacctccctttccagttctaccaaatctgtacttgggagcagcctgctggatccagaacatgacaacagagagctgcgtccacagggaacaaagccctgacctctctctccacattacccttacaaaaacaggccctccccatgagagagctacacggcaggggcagacactgtgagtataagctactttcctccctggagtgctctatgtgggcagaacatgctctccttgcctctcctggaaggtgtcttctctatggcctggctagagctgcaaaaaagggacacaccccacttcggtaaaagaaaatagggaaaggccataaacaaagacagacttgtagtttattttgtattttttttaaataaatacactttacattaaaaaaaaaaaaaaaaancgggaggggtggcctaaaccaaaagttgaagctaaacct

SEQ ID NO: 372 - DNA, 1575 bp, Homo sapiens
  misc feature (58): n equals a,t,g, or c
  misc feature (1492): n equals a,t,g, or c
  misc feature (1548): n equals a,t,g, or c
  misc feature (1556): n equals a,t,g, or c
  misc feature (1559): n equals a,t,g, or c
  misc feature (1565): n equals a,t,g, or c
atggatttgtggacatcctagagagtgacttaaaggacctcgtcatgtacagcaagtnccagcggctcttccgctctccgtccatgccctgcagcgtgatccggcccatcctcaagaggctggagcggccccaggacagggacacgcccgtgcagaataagcggaggcggaggtgacccctcctgaggagcagcaggaggctgaggaacctaaagcccgcgtcctccgctcaaaatcactgtgtcacgatgagatcgagaacctcctggacagtgaccaccgagagctgattggagattactctaaggccttcctcctacagacagtagacggaaagcaccaagacctcaagtacatctcaccagaaacgatggtggccctattgacgggcaagttcagcaacatcgtggataagtttgtgattgtagactgcagatacccctatgaatatgaaggcgggcacatcaagactgcggtgaacttgcccctggaacgcgacgccgagagcttcctactgaagagccccatygcgccctgtagcctggacaagagagtcatcctcattttccactgtgaattctcatctgagcgtgggccccgcatgtgccgtttcatcagggaacgagaccgtgctgtcaacgactaccccagcctctactaccctgagatgtatatcctgaaaggcggctacaaggagttcttccctcagcacccgaacttctgtgaaccccaggactaccggcccatgaaccacgaggccttcaaggatgagctaaagaccttccgcctcaagactcgcagctgggctggggagcggagccggcgggagctctgtagccggctgcaggaccagtgaggggcctgcgccagtcctgctacctcccttgcctttcgaggcctgaagccagctgccctatgggcctgccgggctgagggcctgctggaggcctcaggtgctgtccatgggaaagatggtgtgggtgtcctgcctgtctgccccagcccagattcccctgtgtcatcccatcattttccatatcctggtgccccccacccctggaagagcccagtctgttgagttagttaagttgggttaataccagcttaaaggcagtattttgtgtcctccaggagcttcttgtttccttgttagggttaacccttcatcttcctgtgtcctgaaacgctcctttgtgtgtgtgtcagctgaggctgggggagagccgtggtccctgaggatgggtcagagctaaactccttcctggcctgagagtcagctctctgccctgtgtacttcccgggccagggctgcccctaatctctgtaggaaccgtggtatgtctgccatgttgcccctttctcttttcccctttcctgtcccaccatacgagcacctccagcctgaacagaagctcttactctttcctatttcagtgttacctgtgtgcttggtctgtttgamtttamggcccatcttcagggacamtttccntwagrmtkgttttaagggttcccctgktcaaatatcagttacccattcggtcccangtttttgntgncccaanaaggggaagg

SEQ ID NO: 373 - DNA, 1878 bp, Homo sapiens
  misc feature (1717): n equals a,t,g, or c
  misc feature (1764): n equals a,t,g, or c
  misc feature (1771): n equals a,t,g, or c
  misc feature (1773): n equals a,t,g, or c
  misc feature (1810): n equals a,t,g, or c
ccgccgcggtgattccatcactcggctttcttcccggcctgcctcgcgcccgtagccgggctgggccagaacagcccaagatggccgacttcgatgatcgtgtgtcggatgaggagaaggtacgcatagctgctaaattcatcactcatgcacccccaggggaatttaatgaagtattcaatgacgttcggctactacttaataatgacaatctcctcagggaaggggcagcacatgcatttgcccagtataacatggatcagttcacgcctgtgaagatagaaggatatgaagatcaggtcttaattacagagcacggtgacctgggtaatagcagatttttagatccaagaaacaaaatttcctttaaatttgaccacttacggaaagaagcaagtgacccccagccagaagaagcagatggaggtctgaagtcttggagagaatcctgtgacagtgctttaagagcctatgtgaaagaccattattccaacggcttctgtactgtttatgctaaaactatcgatgggcaacagactattattgcatgtattgaaagccaccagtttcagcctaaaaacttctggaatggtcgttggagatcagagtggaagttcaccatcacaccacctacagcccaggtggttggcgtgcttaagattcaggttcactattatgaagatggcaatgttcagttggttagtcataaagatgtacaggattcactaactgtttcgaatgaagcccaaactgccaaggagtttattaaaatcatagagaatgcagaaaatgagtatcagacagcaattagtgaaaactatcaaacaatgtcagataccacattcaaggccttgcgccggcagcttccagttacccgcaccaaaatcgactggaacaagatactcagctacaagattggcaaagaaatgcagaatgcttaaaggctgaatgtaggattcttcagtatgtggaaagacaaggattcaacgtgtggtcatatgataaataagtgatttataaacaagagtgatattttgctagggctttcaaagttaaccggttttctagcctcatggaatactgttgaacctatagcgttgtcttgattcttttgtgttctctgccttgtaattttctgttactgctatatctacgtgtaaatctttttttctttttttttttttttttttggttaattctgccacatttaatgttggtgagagagtgatctatcctaatgacattttactgtttaaaaaagtttcctagccatgaagccctgctactgatttagacaaggtattatggtcattactttgtacccctatccttccaagcacttctggtacttcagtcgtttttactgatccaccaacacctaaagaggctatgctacagtctctagctaaatggaagacacattcatccttctccctctgactgctttgatcatcatttattgcatctcataactaattttctaaagtttggattgggacttttcaggtcctttttggagggcaaaggaagtgccagcttctctggggaacttgtttttaaatccaaagacttgaaccacattccctgcacatgaacatgtttgcttttatcccttctctcattgtctccttcccatcttagtaccattgtagttattaaaaccatctggcaatttttttttargaaaaggcaattttttaaccccyattttattttntttttaaaaccattttcaaggaaactggctggaccgtactggtgggnattggtnangaagggtaattaaaaaactttggaaaaaaaatgcagnaattggttttggaaaaaagggggaaattaattagggtattctttggggctttttaaataactttttat

SEQ ID NO: 374 - DNA, 846 bp, Homo sapiens
  misc feature (703): n equals a,t,g, or c
  misc feature (747): n equals a,t,g, or c
  misc feature (786): n equals a,t,g, or c
  misc feature (797): n equals a,t,g, or c
gtgcattcaatgctctggttaccttctgcatcagagacctcattggctgtctccagaagctgctgtttggaaaggtggcaaaggatagcagcaggatgctgcagccgtccagcagcccgctctgggggaagcttcgtgtggacatcaaggcttacctgggctcggccatacagctggtgtcctgtctgtcggagacgacggtgttggcggccgtgctgcggcacatcagcgtgctggtgccctgcttcctgaccttccccaagcagtgccgcatgctgctcaagagaatggtggtcgtatggagcactggggaggagtctctgcgggtgctggctttcctggtcctcagcagagtctgccggcacaagaaggacactttccttggccccgtcctcaagcaaatgtacatcacgtatgtgaggaactgcaagttcacctcgcctggtgccctccccttcatcagtttcatgcagtggaccttgacggagctgctggccctggagccgggtgtggcctaccagcacgccttcctctacatccgccagctcgccatacacctgcgcaacgccatgaccacccgcaagaaggaaacataccagtctgtgtacaactggcagtatgtgcactgcctcttcctgtggtgccgggtcctgagcactgcgggccccagcgaagcctccagcccttggtctaacccccttgncccaagtcatcattggctgtatcaagctcatccccawtgcccgnttctaacccgctgcgaatgcamtgcatccgtggcctgangsygcttctynggggaagcttcggggggsctttcatcccggtggctggcctttcaatcct

SEQ ID NO: 375 - DNA, 657 bp, Homo sapiens
  misc feature (14): n equals a,t,g, or c
  misc feature (618): n equals a,t,g, or c
  misc feature (634): n equals a,t,g, or c
  misc feature (646): n equals a,t,g, or c
gcccacgcgtccgnccacgctgagatcggcggccggtgagggggaagcaagtctggtctctgtgattgaagaagtcggctctgggctccagtgcgggaatcacacacatacctcagaatgccgggtctaagttgtagattttatcaacacaaatttcctgaggtggaagatgtagtgatggtgaatgtcagatccattgctgaaatgggggcttatgtcagcttgctggaatacaacaacattgaaggcatgattcttcttagtgaattatccagaaggcgtatccgttctatcaacaaactcatccgaattggcaggaatgagtgtgtggttgtcattagggtggacaaagaaaaaggatatattgatttgtcaaaaagaagagtttctccagaggaagcaatcaaatgtgaagacaaattcacaaaatccaaaactgtttatagcattcttcgtcatgttgctgaggtgttagaatacaccaaggatgagcagctggaaagcctattccagaggactgcctgggtctttgatgacaagtmcaagaracctggatatggtgcctatgatgcatttaagcatgcagctyagrmcccatctaattttggaaaggttaanattggaatgaaaattnaacgggaaaggnctcattaataa

SEQ ID NO: 376 - DNA, 695 bp, Homo sapiens
  misc feature (39): n equals a,t,g, or c
  misc feature (56): n equals a,t,g, or c
  misc feature (103): n equals a,t,g, or c
  misc feature (647): n equals a,t,g, or c
  misc feature (653): n equals a,t,g, or c
  misc feature (662): n equals a,t,g, or c
  misc feature (680): n equals a,t,g, or c
acaatctgaatgctacttacattgtttaactcgcgtccntttgaagagaccaccanacaggctttgggtgagcaataaatctttttaatcacctgggtgcagncaggctgagtccacaaagagagtcagctaagggagataggggtctatgaaggggtggggtcgttttataagatttaggtaggtaaaggaaaattacagtcaaaggggggttgttctttggtgggcaggagtgggggtcacaaggtgctcagtgggggagattttttgagccaagataagccaggaaaaggamtttcacaagktaatgtcatcagttaaggcaaggactggccatttwcrcttcttttgtggtggaatgtcatcagttaaggyrgggcagggcatwttcacttcttttstgattcttcagttacttcaggccatctgggcgtrtacgtgcawgtcataggggatgcgatggcttggcttgggctcagaggcctgacattcccaaagagaatacgaagctaagtgagggaagagatttttttatgtttcattcctagtgctgtgtgggcacttagcaaataattttagaacaaatgaatacactttgccagatttaatagagaagtttttacttactgaagttggaagatttgtangtgttnccactcgcnccatggacagtaatgtanggatttaaaggcagg

SEQ ID NO: 377 - DNA, 3610 bp, Homo sapiens
  misc feature (29): n equals a,t,g, or c
ggcacgagagcgggtctggctggcggcancggcgggagggagccgagagacccgagtgcacgtgtggagaagcggcggcacaagcgcggcggcgggagacactcccgcccccaccagactcaagccctcactcgactctcgcggccttcgttgctcgcacagctccctgcccaggctaggaggccggcttgcggggttgagtggcccgagctaagggtgcggagaccyaagggcggcgactacgacggcgttgatatcggtggtaacgacggcctcagcaggcggggaagatgaaagtagccggatcgagctgggagatgtgacaccacacaatattaaacagttgaaaagattgaatcaggtcatctttccagtcagctacaatgacaagttctacaaggatgtgctggaggttggcgagctagcaaaacttgcctatttcaatgatattgctgtaggtgcagtatgctgtagggtggatcattcacagaatcagaagagactttacatcatgacactaggatgtctggcaccttaccgaaggctaggaataggaactaaaatgttaaatcatgtcttaaacatctgtgaaaaagatggtacttttgacaacatttatctgcatgtccagatcagcaatgagtcggcaattgacttctacaggaagtttggctttgagattattgagacaaagaagaactactataagaggatagagcccgcagatgctcatgtgctgcagaaaaacctcaaagttccttctggtcagaatgcagatgtgcaaaagacagacaactgaacaaattacaaatgaactttcttgcacttgcttgtcgccaaataaaagagaggcccattgattcctcccccaccccaacacttttcttttaaagcttttctccctccttgttcttgtttttctttcttcctttccttttctctgagagttttaatactttcaaggactttaaaaaaataatcatgtttgaattgttttctcttatttttgtgaggtggtttgaaggaaggacaaggtagatctgtttagttttgcagttgaagttagatggtcctaaacatttaattgtcaaataatttcaaatttaatgtcctgctttcacattgaagggcagagcctacaaaacattgtatatttcaaaagacaaaaagaagcagcagcagtatcttgttctctaattcatagacaagttgagtgtgtttgtggtactttgggtttttaaacactttgggatactaatccctagacattgccttcactccacctttagtccttctgagcactctctcgggagttggaacattgttatccttgtaagaaatactaagcttatgttgatttttaagtaattatatcttctcttcttgctggtgggtggggcagtttggtttagtgttatactttggtctaagtatttgagttaaactgcttttttgctaatgagtgggctggttgttagcaggtttgtttttcctgctgttgattgttactagtggcattaacttttagaatttgggctggtgagattaattttttttaatatcccagctagagatatggcctttaactgacctaaagaggtgtgttgtgatttaattttttcccgttcctttttcttcagtaaacccaacaatagtctaaccttaaaaattgagttgatgtccttataggtcactacccctaaataaacctgaagcaggtgttttctcttggacatactaaaaaatacctaaaaggaagcttagatgggctgtgacacaaaaaattcaattactgtcatctaatgccagctgttaaaagtgtggccactgagcatttgattttataggaaaaaatagtatttttgagaataacatagctgtgctattgcacatgctgttggaggacatcccagatttgcttatactcagtgcctgtgatattgagtttaaggatttgaggcaggggtaattattaaacatattgcttctattcttggaaaaatagaagtgtaaaatgttaataatacaaatgtcactgtgacctcctccactgagaggactggtttatgccagatcattttccggcacacacggagtggctttgacagattgataactttgtaagatgggagacatctgaaatattcatgttttccttttgtagtcccatctccactatttagaaatgttctcagactttaaaataatgcacagggcttgagctttctgtcatttgactttaaaaggaagtttcattcatatttatcctcttatgtaaaattgcggtataaagtctcatttccaaatatgttaaatgacaaaattattttataaaatgtttatgcacactttataaccttaagtttttatttgagaatgtgaaagtacaaagtgcagtagacttcaacaatcttgagtgccaagaataatacagaaaaagaagacagttgatgaatgagtttatagggttctaatcttaagatggtaaaaatgtagaaagaccttgctggttttttgggggtattcgtttcttaaacaatccaaatctaagcttagaagaaaagtttagcgttaagcacctttatcttcatgaataagcttcagcttgctcttggcaagagaagagtgcttgagttacagaaggcataagtagtttgaagaatgcagcagcctttttgtaaacttcccagatatcaaaatagactttgatatataaatggttttctgagatgacactgcctctatttctataaccatttcacctggactatctaatcagtcctatgaatgtatccctaaatgtggttattgaaaacctaatagctgcctcatgacaagtacatgttatttaaggaggaaaaaatattaaattttgaattgagtgtgtaggctccctatcattatatatagagtttctttttccacggtagtcagtgacttaacctgaattgtaaatgtttgtaaagggttaattgtcctacatcaaacttagttaaataattccatccacttatggaggaggaggagaatgtggaagaggtaaaaagctgggcacaagttcatatgcctatgagtcagtaaagactgaagtaatgtcctatgttgagctggttattttgatatatgataataattatctttgaagtagaacaattctgttaactggaaaatcacaggatatatccatcatatttttcaggacagatagtttttactgtggggcaaataggttaaaattacactatgttagttgcatttaggttttaaagcaaagaatctgtagagaaatctatgcaatatatagtttgtccagattagctttcatttggggaatgaagttctgaaatatctaaagcagtttactcatcaattgaaaagtcctccaaaaagagaactattgggaaaccatggtgtggtggtggaaaagaaaagctccctcagttttttggagggaataacttaaaaaaatacttaaatggctaagtttacttggtgcagttaagaattaaacttgtcaattttaacattgctgttacatctgaaataaacttatgtgatgttctggtaaaaaaaaaaaaaaaaaaccaagactagttctctctcactctcc

SEQ ID NO: 378 - DNA, 223 bp, Homo sapiens
  misc feature (68): n equals a,t,g, or c
gtaaaaccgtatactaaatttgaaatagaaatataagcgtgaactcatttgtttgttcttttaccgtnagacacattttctacctcctgccccagtacagttagacacatccaagcacctagaagttggtctcctaatacattgaaaaaccatgaattcataktgatggtttcccaaagcccaaaccaacccaaccaaacatgttatttggtcctccttggaa

SEQ ID NO: 379 - DNA, 809 bp, Homo sapiens
  misc feature (171): n equals a,t,g, or c
agccaggcctccagccgcgaggactggagtcgcgggaggtggagccccagtccggaagccggggatccgcggccatgacggtgccggtccgcggcttctcgctgctccgcggccgccttggccgagcgccggcgttgggcagaagcacagcaccctccgtaagggcaccgngagagcccggragtgcgttccggggctttcggagcagcggtgtgaggaccagcagagagaagagattccatcttccagaggttgccactgtctgcctccccacttgtccccatccacagtcatcttttttatatatataatgacacattagttgtctagttcttcatagttaatgtggtttaagtctgacatcttttcttttgccatgaaatttacaccttagtgttattctcactgaaaattgcctttgagtttgataaactcttatcccagtgatattgactgttttaaattaacagatttatcaccatttctgagctgtgtagggccttaattgaaaaagtatctttgattattttttcacattttggccacakgccyataataatggratatttacagtactttttagtggagaacttttttaagtagaatttcaataattaatgtttgatggagtttggaagttaccgtattttgaagtatcgtttaacattcttctctcaatgagttttcctttaaaatttgcagtgaatttgttttcctgtttatgcatgagaatttaggtcttattaattgggggaaattaatgttaaagtaataaataagcccttgttgcaaacggacgcgtgggtcga

SEQ ID NO: 380 - DNA, 2550 bp, Homo sapiens
ggcacgagggaaccgmtgctgctggccgaactcaagcccgggcgcccccaccagtttgattggaagtccagctgtgaaacctggagcgtcgccttctccccagatggctcctggtttgcttggtctcaaggacactgcatcgtcaaactgatcccctggccgttggaggagcagttcatccctaaagggtttgaagccaaaagccgaagtagcaaaaatgagacgaaagggcggggcagcccaaaagagaagacgctggactgtggtcagattgtctgggggctggccttcagcccgtggccttccccacccagcaggaagctctgggcacgccaccacccccaagtgcccgatgtctcttgcctggttcttgctacgggactcaacgatgggcagatcaagatctgggaggtgcagacagggctcctgcttttgaatctttccggccaccaagatgtcgtgagagatctgagcttcacacccagtggcagtttgattttggtctccgcgtcacgggataagactcttcgcatctgggacctgaataaacacggtaaacagattcaagtgttatcgggccacctgcagtgggtttactgctgttccatctccccagactgcagcatgctgtgctctgcagctggagagaagtcggtctttctatggagcatgaggtcctacacgttaattcggaagctagagggccatcaaagcagtgttgtctcttgtgacttctcccccgactctgccctgcttgtcacggcttcttacgataccaatgtgattatgtgggacccctacaccggcgaaaggctgaggtcactccaccacacccaggttgaccccgccatggatgacagtgacgtccacattagctcactgagatctgtgtgcttctctccagaaggcttgtaccttgccacggtggcagatgacagactcctcaggatctgggccctggaactgaaaactcccattgcatttgctcctatgaccaatgggctttgctgcacattttttccacatggtggagtcattgccacagggacaagagatggccacgtccagttctggacagctcctagggtcctgtcctcactgaagcacttatgccggaaagcccttcgaagtttcctaacaacttaccaagtcctagcactgccaatccccaagaaaatgaaagagttcctcacatacaggactttttaagcaacaccacatcttgtgcttctttgtagcagggtaaatcgtcctgtcaaagggagttgctggaataatgggccaaacatctggtcttgcattgaaatagcatttctttgggattgtgaatagaatgtagcaaaaccagattccagtgtactagtcatggatctttctctccctggcatgtgaaagtcagtcttagaggaagagattccacttgcacggcaacagagccttacgttaaatyttcagtccagttatgaacagcaagtgttgaactctttctgcttgttttgattcaaagtgcagttactgatgttgttttgattatgcaactaagtaggcctccagagcctctctagtggcagagcagctcacactccctccgctgggaacgatggcttctgcctagtacctatccttgtgtttctgatgcagtggtagcattggttcaagttctctcctgctgtggtcagagttgcttcgatgttggccaagtgcttttcttcttgggctcccttctgacctgcaggacagttttcctggagccatttggtatgaggtattaatttagcttaactaaattacaggggactcagaggccgtgctcctgaccgatccagacactattactggctttttttttttttttttaacaatggtgtgcatgtgcaggaaatgacaaatttgtatgtcagattatacaaggatgtattcttaaaccgcatgactattcagatggctactgagttatcagtggccatttattagcatcatatttatttgtattttctcaacagatgttaaggtacaactgtgtttttctcgattatctaaaaaccatagtacttaaattgaacagttgcaaagatgtcttaattgtgtaaagaattggtgtagtcatgactttagctgatactcttatgtacgagatctgtctctgctgtttaacttcattggattaatcagctggtttcaactctactgcgaaacaaaaatagctccttaaaagtactgttctccttcagtggcatgtagttatctaatcaagacacctcattcaaacaaaacctgccttaggaaaatttaatatattttaaattattttaaaagaaatacaacatcttattctttagctttcttaatcggtgctttatggaggccagtgtaacgttacatgactcgttgagaaagttgaggaatttcctctaccacctttgttgcttgaagaaaaacatgtcttttcaaaatgagaggctttcattgaagaaaagaaaaaaacaacagttaaaagcttttggctctctgtttcatttttttccattaagaaaaaaaaaagtccccttt

SEQ ID NO: 381 - DNA, 1268 bp, Homo sapiens
  misc feature (1259): n equals a,t,g, or c
  misc feature (1262): n equals a,t,g, or c
ggcacgaggggctgagcaagcactgaggaggtggatggaagggagcatctggagggggggagcttccttgagcagtgggcccaggcctggccctccacacttcattctctgacctttctctctcctcatttcggtgcatgtcctttctgcagctgcctttcagcacaggtggttccactgggggcagctaacgctgagtgacaaggatgggaagccacaggtgcattttactcaagtcttctctagtcaatgaggggcacccagtgcttctagggcaggctgggtggtggtcccctaggtatcagcctctcttactgtactctccgggaatgttaacctttctattttcagcctgtgccacctgtctaggcaagctggcttccccattggcccctgtgggtccacagcagcgtggctsccccccagggccaccgcttctttcttgatcctctttccttaacagtgacttgggcttgagtctggcaaggaaccttgcttttagcttcaccaccaaggagagaggttgacatgacctccccgccccctcaccaaggctgggaacagaggggatgtggtgagagccaggttcctctggccctctccagggtgttttccactagtcactactgtcttctccttgtagctaatcaatcaatattcttcccttgcctgtgggcagtggagagtgctgctgggtgtacgctgcacctgcccactgagttggggaaagaggataatcagtgagcactgttctgctcagagctcctgatctaccccaccccctaggatccaggactgggtcaaagctgcatgaaaccaggccctggcagcaacctgggaatggctggaggtgggagagaacctgacttctctttccctctccctcctccaacattactggaactctatcctgttaggatcttctgagcttgtttccctgctgggtgggacagaggacaaaggagaagggagggtctagaagaggcagcccttctttgtcctctggggtaaatgagcttgacctagagtaaatggagagaccaaaagcctctgatttttaatttccataaaatgttagaagtatatatatacatatatatatttctttaaatttttgagtctttgatatgtctaaaaatccattccctctgccctgaagcctgagtgagacacatgaagaaaactgtgtttcatttaaagatgttaattaaatgattgaaacttgaaaaaaaaaaaaaaaaaaaaaaaaaaaaaaaaanaanaaaaaa

SEQ ID NO: 382 - DNA, 854 bp, Homo sapiens
  misc feature (794): n equals a,t,g, or c
  misc feature (807): n equals a,t,g, or c
  misc feature (817): n equals a,t,g, or c
  misc feature (835): n equals a,t,g, or c
gcggacgcgtggcggacgcgtgggtgcttatgaacatccaggctccagccttttccctgagggtcctaatgactatgtcttcagtcatcttccactccactctcagcaacaagtgcgagcccctatccccatggtgcccgttggtgggatccagatggttcactccatgccgccagccctttccagtttacatccttcacccacattgcccctgccaatggagggctttgaggagaagaaaggcgcgtcaggggagtccttctccaaggacccctatgtgctttctaagcagcatgagaagcgaggtcctcacgctttgcagtcatctggtccrcctagcactccctcctctcctcggctgttgatgaaacagagcacttcggaagacagcctaaacgcaacagagcgggaacaggaggaaaatatacagacttgtacaaaagccattgcctctctccggattgccacggaagaggcagctctgctcgggccagatcagccagcgcgggtgcaggagccccaccagaaccccctgggaagtgcacatgttagcattagacactttagtagacctgagccaggtcagccctgtacctcagccacccaccctgacttgcatgatggtgaaaaggacaattttggtacatcacagactccattagctcactccacgttttacagcaagagttgtgtggrtgacaagcagttggrcttttcacagcagcaagggaattttctttcaagcacagrgggaaagcaaagatccttccttcaggaaaagagtycagcttacnttggtcttttggntggctggggngattttccttttcccacntttttcccctttttttttg

SEQ ID NO: 383 - DNA, 1091 bp, Homo sapiens
gttttcaggattgcattgtctatgcaaagaataaggcctggcacatcataagcactcaaagtattatgtttctttttccctattctaactcagcattattggtgcttcttatatgacttccctctcattttatcagatgtgatgactgaagcccaccacaaatatgaccactctgaggctacaggatcctcaagctgggatatccaaaattctttcagaagagagaagctggaacaaaaatccccagattcgaagacactacaggaagattcacctggagtgagacaaagggtctatgagtgccaggagtgtggaaaatccttccggcaaaaaggtagtctaacgttacatgagagaatccacactggtcaaaagccttttgagtgcacccactgtggaaaaagcttcagggccaaaggcaatcttgttacacatcaacggatacacacgggagagaagccttatcagtgcaaggagtgtgggaaaagcttcagtcaacgaggtagtctcgctgtccacgagagactccacactggacagaaaccctacgagtgtgctatttgtcagagaagcttcaggaatcagagtaaccttgctgttcacaggagagttcacagtggtgagaagccctatagatgtgatcagtgtggaaaagccttcagtcagaaaggaagcttaattgttcacatcagagtccacacaggcctgaagccctatgcctgtacccagtgcaggaagagtttccacaccagggggaattgtattctgcatggcaaaatccacacaggagagacaccctatctgtgcggccagtgtggaaaaagcttcacccagagagggagtctggctgtgcaccagcgaagctgctcacagaggctcaccctttgaccactttcctgaagagaagttctctttatgaattaagagtacaaaatcctctgagatgaagcaacctatccagttctatggaatgaatggagaatctttcagaaagaccatcattgggtagggcaaactgatttttttcctttcccccaaaagagtatgaaaaataaatgtcttgtttattatcattaaaaaaaaaaaaaaaa

SEQ ID NO: 384 - DNA, 1029 bp, Homo sapiens
  misc feature (1014): n equals a,t,g, or c
  misc feature (1015): n equals a,t,g, or c
  misc feature (1026): n equals a,t,g, or c
ggcacgagctggtcaaggccgttccgtcagtgttttcagacgccctgggaacgcggctgcagggtccggtcttcggtttgcacagctagaggccgcgcacagcaaaggatgagcggaaccttggaaaaggtgctgtgcctgaggaacaataccatttttaagcaagccttttctctcttaaggtttagaacttcaggagagaagcccatctattctgtaggtggaattctactaagtatcagtcggccctacaagacaaagcccacccacggcattggaaagtacaagcacttaattaaagcagaagagcccaagaagaagaagggaaaagtggaagtgagagccattaatttggggacagattatgaatatggggttttaaatattcatctgactgcatatgatatgaccctggcagagagttatgcccagtatgttcacaacctctgcaactctctctccattaaagtcgaggaaagttatgcaatgccaaccaaaaccatagaagtgttgcagttgcaggaccaaggcagcaaaatgctcctggactcagtgcttaccacccatgagcgagtggttcagatcagcggtttgagtgctacgtttgcagaaattttcttggaaataatccaaagcagtcttcctgaaggagtcagactgtcagtgaaggagcacactgaagaagacttcaagggacgattcaaagctcgaccagaactggaagaactgttggccaagttgaagtagctactgtagaccctttcatgccagcagtggtcatattgagtgccaaagagaagagcttactgggtagttagagttcatcaggagacccaacccttagatttcataagtacccattcccatagccagtaatgtcctcactcctctgtggcttggctgtacttgccatttcttaccacttacctatgaggtaatgcttgttatcttccatctaataaaaatctgctgcagatgtgtaaaaaaaaaaaaaaaaaaaaaaaaagaaaaaannaaaaaaaaaanaag

SEQ ID NO: 385 - DNA, 583 bp, Homo sapiens
  misc feature (551): n equals a,t,g, or c
  misc feature (574): n equals a,t,g, or c
ccccgggtcgacccacgcgtccgcccacgcgtccgcrcggccgactcgcaagatggcgccgcagaaagacaggaagcccaagaggtcaacctggaggtttaatttggaccttactcatccagtagaagatggaatttttgattctggaaattttgagcaatttctacgggagaaggttaaagtcaatggcaaaactggaaatctcgggaatgttgttcacattgaacgcttcaagaataaaatcacagttgtttctgagaaacagttctctaaaaggtatttgaaataccttaccaagaaataccttaagaagaacaatcttcgtgattggcttcgagtggttgcatctgacaaggagacctacgaacttcgttacttccagattagtcaagatgaagatgaatcagagtcggaggactaggcaaaggctccccttacagggctttgcttattaataaaataaatgaagtatacatgagaaataccaagaaattggcttttagtttatcagtgaataaaaaatattatactcttgaaaaaaaaaaaaaaanggcggccgttttaaagatccttnaggggccaa

SEQ ID NO: 386 - DNA, 2410 bp, Homo sapiens
  misc feature (2167): n equals a,t,g, or c
tatacccacgcgtccgcggacgcgtgggtcgctgggctcagcagtgaagctgcggaccttcgcggagaactatcctatccctgaaccaggcccaaatgaggtcttgctgaggatgcattctgttggaatctgtggctcagatgtccactactgggagtatggtcgaattgggaattttattgtgaaaaagcccatggtgctgggacatgaagcttcgggaacagtcgaaaaagtgggatcatcggtaaagcacctaaaaccaggtgatcgtgttgccatcgagcctggtgctccccgagaaaatgatgaattctgcaagatgggccgatacaatctgtcaccttccatcttcttctgtgccacgccccccgatgacgggaacctctgccggttctataagcacaatgcagccttttgttacaagcttcctgacaatgtcacctttgaggaaggcgccctgatcgagccactttctgtggggatccatgcctgcaggagaggcggagttaccctgggacacaaggtccttgtgtgtggagctgggccaatcgggatggtcactttgctcgtggccaaagcaatgggagcagctcaagtagtggtgactgatctgtctgctacccgattgtccaaagccaaggagattggggctgatttagtcctccagatctccaaggagagccctcaggaaatcgccaggaaagtagaaggtcagctggggtgcaagccggaagtcaccatcgagtgcacgggggcagaggcctccatccaggcgggcatctacgccactcgctctggtgggaccctcgtgcttgtggggctgggctctgagatgaccaccgtacccctactgcatgcagccatccgggaggtggatatcaagggcgtgtttcgatactgcaacacgtggccagtggcgatttcgatgcttgcgtccaagtctgtgaatgtaaaacccctcgtcacccataggtttcctctggagaaagctctggaggcctttgaaacatttaaaaagggattggggttgaaaatcatgctcaagtgtgaccccagtgaccagaatccctgatgttaatgggctctgccctcatccccacagtcttgggatctcagggcacaatggctggacatgggtgggctctgatgcagaactttctcttttgaatgttaagaataactaatacaattcattgtgaacagaagtccttaagcagaggaattggtgtgccttaaagatacaatctgggatagtttgggggaacttgtagccagaatgccctgttcatgctgagcaaagttcagcaagtagagcagagtttggcaggcaggtgccaggaactccccttcttcctggagtgccttcattgaggaaggaaatctggcccttgggtttcctggttccactgctactgacccagaggggaatgagggctgagttatgaaaagataacttcatgaagacttaactggcccagaagctgattttcatgaaaatctgccactcagggtctgggatgaaggcttgtcagcacttccagtttagaacgcaatgtttctagagacatattggctgtttgttttgatgataaaaggagaataagaaaaggcatcactttcctggatccaggataatttttaaaccaatcaaatgaaaaaaacaaacaaacaaaaaaggaaatgtcatgtgaggttaaaccagtttgcattcccctaatgtggaaaaagtaagaggactactcagcactgtttgaagattgcctcttctacagcttctgagaattgtgttatttcacttgccaagtgaaggaccccctccccaacatgccccascccacccctaagyayggtcccttgtcaccaggcaaccaggaaactgctacttgtggacctcaccagagaccaggagggtttggttagctcacaggacttcccccaccccagaagattagcatcccatactagactcatactcaactcaactaggctcatactcaattgatggttattagacaattccatttctttctggttattataaacagaaaatctttcctcttctcattaccagtaaaggctcttggtatctttctgttggaatgatttctatgaacttgtcttattttaatggtgggttttttttctggtaagattggacctaaatcgnatcatgcaactgtgacttgrctatctcagatgagtatgtgcrtcatcgtggctaccttatcttattgcatgtgaagtagttagagctgttctgactggacgttccttggcggggttgttggggggggatgtgtgtgaaaaatattcggccgttgggggttccggccgctgcatggcatcctacgcctcgtgggggcccctttgagcgcgcggtggcccgtcttctcggtccaaggccgcgccg

SEQ ID NO: 387 - DNA, 689 bp, Homo sapiens
agtaggcagagtttacaaaggtctaggatgacatctggtgtattgactgtggccagtcttaaagctagtttttgctatgtggaacatgctgctctaattcagatttaaagagtttcttcctgttaattcgaagctcactgtgcctcttgtttccgagggaagaaggactgattaagtcatctaaatggatgcaatactgaattacaggtcagaagatactgaagattactacacattactgggatgtgatgaactatcttcggttgaacaaatcctggcagaatttaaagtcagagctctggaatgtcacccagacaagcatcctgaaaaccccaaagctgtggagacttttcagaaactgcagaaggcaaaggagattctgaccaatgaagagagtcgagcccgctatgaccactggcgaaggagccagatgtcgatgccattccagcagtgggaagctttgaatgactcagtgaagacggtgggtttctcgctgggtgcgacgtgaatttgtgaagctcaggatgcccatggattagactcatgtagtagcttaaagagtcattaggcgataggagggagaaaaccaagaagttagcagagtctggatataattcagtgtccgtaaatcccatgaagagaagctcatcagaataaaggcaatgaatttgtgcyaaaaaaaaaaaaaa

SEQ ID NO: 388 - DNA, 798 bp, Homo sapiens
  misc feature (215): n equals a,t,g, or c
gctcgtgccgaattcggcacgagtgtacccgagtttttgattctcaacatgtccgagactgctcctgccgctcccgctgccgcgcctcctgcggagaaggcccctgtaaagaagaaggcggccaaaaaggctgggggtacgcctcgtaaggcktccggtcccccggtgtcagagctcatcaccaaggctgtggccgcctctaaagagcgtaggangtttctctggctgctctgaaaaaagcgttggctgccgccggctatgatgtggagaaaaacaacagccgtatcaaacttggtctcaagagcctggtgagcaagggcactctggtgcaaacgaaaggcaccggtgcttctggctcctttaaactcaacaagaaggcagcctccggggaagccaagcccaaggttaaaaaggcgggcggaaccaaacctaagaagccagttggggcagccaagaagcccaagaaggcggctggcggcgcaactccgaagaagagcgctaagaaaacaccgaagaaagcgaagaagccgccgcggccactgtaaccaagaaagtggctaagagcccaaagaaggccaaggttgcgaagcccaagaaagctgccaaaagtgctgctaaggctgtgaagcccaaggccgctaagcccaaggttgtcaagcctaagaagcggcgcccaagaagaaatagcgaacgcctacttctaaaacccaaaargctcttttcagagccaccactgatctcaataaaagagctggataatttctttaaaaaaaaaaaaaaaaaaaaaaaaaaaaaaaa

SEQ ID NO: 389 - DNA, 1691 bp, Homo sapiens
  misc feature (436): n equals a,t,g, or c
  misc feature (1575): n equals a,t,g, or c
  misc feature (1630): n equals a,t,g, or c
  misc feature (1636): n equals a,t,g, or c
  misc feature (1651): n equals a,t,g, or c
  misc feature (1664): n equals a,t,g, or c
atttgggccttatatgtcaagccctttggtttccgtcttattttaggggttgttatggggscctgggtggtcggcctcacatgggaaggggatgggtagtggatggggtttctgttgtatcttgtgggcgggtaattttgcttttgtttttgttcacattcttccccctccacaagccaaagtcgtttcatttggtttccactgtgtggactgtgctggagcttggcgcctgccagaaaaatttggggctaggcaagccccaggttgcagacatggtgaagcagagaaactgttcttctggttcctgcacaacctcagaggggcaaaaaccctccccaggaaggaggagggtgttcaggagccagacttttggagagaaggcagctcccagcctgctgggtgaccgccattctgcgtgtgttccccagctgggcanggctggaagccttacgtatgaagcatggagaagcagccattgtccccactatgggcagaggggggacccggctggccccttgggtcagactggagccaacaccgccagccaccccctctggctgctggcaatgccacaggtgcccaagaagatggaggatccctgtgccaggagccaacctggtsttcccgagggtcagtgccccagtgaagacagaagcgagagaataaagttccctgtaggtcctctgtcacctttgggttgtgtttttcaattgttgacatttcagaggggaccctccagaagcccagccggcttcccccaaggactcccccttcgctgggagtggatttccacacgtgcctttgatttcggacagattgggcctcacagccaccgattcagctgccagggtccctggactgggggttggtgttttctatagaggaggaaaggccctccctcaccctgctccccacccaggcagggcagcatgggacccagtgtctcagtgccttcaaaacccacccccacccctaccctaccccaccacaccccatcccagaggccttgcctgggcaamcctaagcccctgtccctcgccatacactgatgcctggcagctagagcaaatggctcgtgttctttgtcgaagcctgtggtgagattgttttgtttccttttgttttgtgagtttgtttaaaattgaaattagttattttcttctgctggacagtattaaatagagcaggatgttgagttaatctgctagattgcagtactaatggtagtggtttagtgtcttcatgttaatattatttgtacttatttgaacaataatgataaagaagtggttcattattttttaattaatgcactttaaataaggtagaatggaaaaaacccagagagcaaagtgcattacttaaagatgcagtatatacttttctcatttttaaacagcacatatttattaagagaaaaaaagtaatttatgactatttaaaataaaatttaaaagtagagtgactgtcaggtaaagaaccttcaatgtagctatcttccaagggggaagggcctgcagcctccgctcctcaaatgtctgcactgaaccagttccagtcactaattgcgccaancaaggccaggaaggaattcaaaacatgttctggccaagcacaagaacatccccantgggantggaacacaatgctncccaaaaacctgnctttcctggccttccccaacaactggg

SEQ ID NO: 390 - DNA, 454 bp, Homo sapiens
  misc feature (425): n equals a,t,g, or c
  misc feature (444): n equals a,t,g, or c
  misc feature (451): n equals a,t,g, or c
gcgacggcgctggcttgcccggctgggagagggcgtaagcaaaatgatgcttcaacacccaggccaggtctctgcctcggaagtgagtgcttctgccatcgtcccctgcctgtcccctcctgggtcactggtgtttgaggattttgctaacctgacgccctttgtcaaggaagagctgaggtttgccatccagaacaagcacctctgccaccggatgtcctctgcgctggaatcagtcactgtcagcgacagacccctcggggtgtccatcacaaaagccgaggtagcccctgaagaagatgaaaggaaaaagaggcgacgagaaagaaataagattgcagctgcaaagtgccgaaacaagaagaaggagaagacggatgcctgcagaaagtgagtgccttctaaccttacccttctctcgctangcctgtctttaccaacttnatgtggntat

SEQ ID NO: 391 - DNA, 807 bp, Homo sapiens
  misc feature (527): n equals a,t,g, or c
  misc feature (586): n equals a,t,g, or c
  misc feature (735): n equals a,t,g, or c
  misc feature (805): n equals a,t,g, or c
caagctctaatacgactcactatagggaaagctggtacgcctgcaggtaccggtccggaattcccgggtcgacccacgcgtccgggcggaaaaccgaagttggaagtgtctcttagcagcgcgcggagaagaacggggagccagcatcatggcagaacaggatgtggaaaacgatcttttggattacgatgaagaggaagagccccaggctcctcaagagagcacaccagctccccctaagaaagacatcaagggatcctacgtttccatccacagctctggcttccgggactttctgctgaagccggagctcctgcgggccatcgtggactgtggctttgagcatccttctgaggtccagcatgagtgcattccccaggccatcctgggcatggacgtcctgtgccaggccaagtccgggatgggcaagacagcggtcttcgtgctggccaccctacagcagattgagcctgtcaacggacaggtgacggtcctggtcatgtgccacacgagggagctggccttcnagatcagcaaggaatatgagcgcttttccaagtacatgcccagcgtcaaggtgrgtcyntcggccagactggaccaggcgccacttggkttctgmagctttgktagcctcggctctggcccarccagcatttaccaagcttggcaagggcagctgcctttgaaggtttgcagtggtttttgctccttaaaagcctgattgaattatgncatggctcccaggggcctgcgccagttcccagcctggggctgcctttgaaatgggaaccccgggaaggcnct

SEQ ID NO: 392 - DNA, 927 bp, Homo sapiens
  misc feature (916): n equals a,t,g, or c
ctgcagcgggagctggatgaggccacggagagcaacgakgccatgggcgcgaggtgaacgcactcaagagcaagctcaggcgaggaaacgagacctctttcgttccttctagaaggtctggaggacgtagagttattgaaaatgcagatggttctgaggaggaaacggacactcgagacgcagacttcaatggaaccaaggccagtgaataagcaactttctacagttttgcaccacggcaagaaaaccaaaaaccaaaacaaacaaacaaaaaaaacccaacaacaacccagaacaaagcaaaacccagcagactgtacttagcattgtctaaatccattctcaaattccaaatatcacagacacccctcmcacaggaaacttcgcagtgatgcaccaggcgaggaaacgagacctctttcgttccttctagaaggtctggaggacgtagaagttattgaaaatgcagatggttctgaggaggaaacggacactcgagacgcagacttcaatggaaccaaggccagtgaataagcaactttctacagttttgcaccacggcaagaaaaccaaaaaccaaaacaaacaaacaaaaaaaacccaacaacaacccagaacaaagcaaaacccagcagactgtacttagcattgtctaaatccattctcaaattccaaatatcacagacacccctcacacaaggaatataaaaaccaccaccctccagcctgggcaacgtagtaaaaacctcatctatacaagattttaaaaataagctgggcgtggtggtacacacctgtggtcccagctactagggaggctgagccaggaagaacgstycagcccaggayttcgrggctgcaatgagctataattgcatcattgcactccagcctgggcaacagagaccctgttttnaaccaccacca

SEQ ID NO: 393 - DNA, 1023 bp, Homo sapiens
ggcacgagccaccacgaggccaccagggtgactgcgggattccgatctgcgccggagctgcgatgctagagcactcttgccacccccaccccacggacgtgttgcagtgatatcagaattttgcgtgcggtttacccgtgtttaacctctttgcgtctcgcttctgaatcgtatccacttgagcatcactagactgatctattttaacactggtggggggcagcgaggacatggttttaaactttaaaatgaaaatgtgaaactaggaatgttgctgtgagaccccttggacaaacagatttttgcactggggatagaacttgagcaatttctgtcttggcctcgccactgacgtcccttctttcctgtggggacaggatggacagattcctggtgaaaggggctcaagggggccttttgaggaagcaggaggagcaagagccaactggagaagagccagctgtgttgggaggagacaaagaaagcacaaggaagaggcycaggagagaggccccagggaatggaggccactcagcaggccctagctggcggcacattcgggctgagggcctggactgcagttacacagtcctgtttggcaaagctgaggcagatgagattttccaagagttggagaaagaagtagaatattttacaggtataaagatggctgtgaccacatcggggagcaccgagatgatgaaagagaactggcccctgggagccccattgcctctgtctccttcggtgcctgcagagactttgtcttccggcataaggattcccgtgggaaaagcccctccaggagggtggcggtggtcaggctgccgctggcccacgggagcttactaatgatgaaccacccgaccaacacgcactggtaccacagtcttcccgtgagaaagaaggttctggctccacgggtgaatctgacttttcgtaaaattttgcttactaaaaaataaaaacatttttaacagttaaaaaaaaaaaaaaaaaaaaaaaaaaaaaaaaaaaaaaaaa

SEQ ID NO: 394 - DNA, 822 bp, Homo sapiens
  misc feature (550): n equals a,t,g, or c
  misc feature (788): n equals a,t,g, or c
  misc feature (813): n equals a,t,g, or c
aaaaattttaaacaaagaaaggaaaaaaattgacaataaaagtcactcttctaattgaatatttttatatttttatgaaacaaaagagcatttcttcaggtttctattgtattttttttaacattcttgcagagaaagcaagatccaaattgattttgggatattaaaagttaacagaacactgaacaaggaaagaatggcatagatctatctttacagtctggagttaattcctgttaactcattttatccattccttacataatcttctttcctgttagtccagtttgatggtgtgaatggtgaatttcaggcccagttgctaaattttgtggcatcttcctctagtccttcccacctccagtcatcagccccactctgtcttggagacaggcaggaggtgggggaagagctgaatctctttattttccctggtagagacatcttcaaggcatgaaatagcttaaagagcagagtagaaatggaagaggctttgcaaaaggctagataactaacaacacctgggttggggcggcggcctcttctcttncagctcccttagcttggctccgtaagtggatcacttgccaaatgctttagatgattgcctctcaataattgaaaggtggtggtagttgtattctaaatgatgtagaaggttaaaaataattacattatgcttctattctatcatctaaaacmaatcattaaaactaatttctagctaaatkgttaattataattatgctcagaatctattaatgagctctgctggcttacgactgcgngttaagagaaatctttacaagaccnaggcctgaa

SEQ ID NO: 395 - DNA, 1702 bp, Homo sapiens
  misc feature (1694): n equals a,t,g, or c
  misc feature (1696): n equals a,t,g, or c
gcttcttttgtttctgattatgttttctgcagagagacacgggctcaaggaacccaagagagtggaagaactgcaaaacaagattgtaaattgtctcaaagaccacgtgactttcaacaatggggggttgaaccgccccaattatttgtscaaactgttggggaagctcccagaacttcgtaccctttgcacacaggggctacagcgcattttctacctgaaattggaagacttggtgccaccgccagcaataattgacaaacttttcctggacactttacctttctaagacctcctcccaagcacttcaaaggaactggaatgataatggaaactgtcaagagggggcaagtcacatgggcagagatagccgtgtgagcagtctcagctcaagctgccccccatttctgtaaccctcctagcccccttgatccctaaagaaaacaamcaaacaaacaaaaactgttgctatttcctaacctgcaggcagaacctgaaagggcattttggctccggggcatcctggatttagaacatggactacacacaatacagtggtataaactttttattctcagtttaaaaatcagtttgttgttcagaagaaagattgctataakgtataatgggaaatgtttggccatgcttggttgttgcagttcagacaaatgtaacacacacacacatacacacacacacacacacacagagacacatcttaaggggacccacaagtattgcccyttaacaagacttcaaagttttctgctgtaaagaaagctgtaatatatagtaaaactaaatgttgcgtgggtggcatgagttgaagaaggcaaaggcttgtaaatttacccaatgcagtttggctttttaaattattttgtgcctatttatgaataaatattacaaattctaaaagataagtgtgtttgcaaaaaaaaraaaawaaatacataaaaaagggacaagcatgttgattctaggttgaaaatgttataggcacttgctacttcagtaatgtctatattatataaatagtatttcagacactatgtagtctgttagattttataaagattggtagttatctgagcttaaacattttctcaattgtaaaataggtgggcacaagtattacacatcagaaaatcctgacaaaagggacacatagtgtttgtaacaccgtccaacattccttgtttgtaagtgttgtatgtaccgttgatgttgataaaaagaaagtttatatcttgattattttgttgtctaaagctaaacaaaacttgcatgcagcagcttttgactgtttccagagtgcttataatatacataactccctggaaataactgagcactttgaattttttttatgtctaaaattgtcagttaatttattattttgtttgagtaagaattttaatattgccatattctgtagtatttttctttgtatatttctagtatggcacatgatatgagtcactgcctttttttctatggtgtatgacagttagagatgctgattttttttctgataaattctttctttgagaaagacaattttaatgtttacaacaataaaccatgtaaatgaaaaaaaaaaaaaaaaaaaaaaaaaaaaaaaaaaaaaaaaaaaaaaaaaaaaaaaaaaaaaaaaaaaaaaaaaaaaaaaaaaaaaaaaaaaaaaaaggggngnccgttt

SEQ ID NO: 396 - DNA, 858 bp, Homo sapiens
cttgggcctctgacatgacttatgtgtgtgtgtgtttttggggtggggagggagggagagaagagggggctaaatttgatgctttaactgatctccaacagttgacaggtcatccttgccagttgtataactgaaaaaggacttttctaccaggtatgaccttttaagtgaaaatctgaattgttctaaatggaaagaaaaaaagttgcaatctgtgcccttcattggggacattcctctaggactggtttggggacgggtgggaatgacccctaggcaaggggatgagaccgcaggaggaaatggcggggaggaggcattcttgaactgctgaggatggggggtgtcccctcagcggaggccaagggaggggagcagcctagttggtcttggagagatggggaaggctttcagctgatttgcagaagttgcccatgtgggccccagccatcagggctggccgtggacgtgcccctgcccactcacctgcccgcctgcccgcccgcccgcatagcacttgcagacctgcctgaacgcacatgacatagcacttgccgatctgcgtgtgtccagaaggtgcccttggccgagcgccgaactcgctcgccctctagatgtccaagtgccacgtgaactatgcaatttaaagggttgacccacactagacgaaactggactcgtacgactctttttatattttttatacttgaaatgaaatcctttgcttcttttttaagcgaatgattgcttttaatgtttgcactgatttagttgcatgattagtcagaaactgccatttgaaaaaaagttatttttatagcagcaaaaaaaaaaaaaaaarakcaaaggwtttcattt

SEQ ID NO: 397 - DNA, 1110 bp, Homo sapiens
  misc feature (225): n equals a,t,g, or c
  misc feature (996): n equals a,t,g, or c
  misc feature (1100): n equals a,t,g, or c
  misc feature (1106): n equals a,t,g, or c
cggctgggctgcggaaacgcggccggtccggttccgcggcccaggcagagggactctgcaagcaatggctgcagcgcgcctggcaagagcggcgcctgctgctgcgggagccgcgctacacgctgctggtggccgcctgcctctgcctggcggaggtgggcatcaccttctgggtcattcacagggtggcatacacagagattgactggaaggcctacatggccnaggtagaaggcgtcatcaatggtacctatgactatacccaactgcagggtgacaccggaccacttgtgtacccagctggtttcgtgtacatctttatggggttgtactatgccaccagccgaggcactgacatccgcatggcccagaacatctttgctgtgctctacctggctaccttgctgcttgtcttcttgatctatcaccagacctgcaagtaacctcccttcgtctttttcttcatgtgctgcgcctcttaccgtgtccactccatctttgtgctgcggctcttcaatgacccagtggccatggtgctgctcttcctcagtatcaacctcctgctggcccagcgctggggctggggttgctgctttttcagcctggcagtctctgtgaagatgaatgtgctgctcttcgcccctgggttactgtttcttctcctcacacagtttggcttccgtggggccctccccaagctgggaatctgtgctggccttcaggtggtgctggggctgcccttcctgctggagaaccccagcggctacctgtcccgctcctttgaccttggccgccagtttctgttccactggacagtgaactggcgcttcctcccagaggcgctcttcctgcatcgagccttccacctggccctgttgactgcccacctcaccctgctcctgctgtttgccctctgcaggtggcacaggacaggggaaagtatcttgtcgctgctgagggatccctccaaaaggaaggttccaccccagccccttnacacccaaccagatcgtttytaacccttttcaactccaatttcattgggsatctggtttcagscgkttccttccattaacagtttttaaggtttgggtattttncaaaanattg

SEQ ID NO: 398 - DNA, 864 bp, Homo sapiens
  misc feature (823): n equals a,t,g, or c
  misc feature (830): n equals a,t,g, or c
gcggcacgtggcgcgggtgcggggcgtggagtggcgtggcgtggagtggcgtggcgtggcggggtctcgcggcgcgggcgcgcacccggagctgtggacggagagtgcctccctctggcctcagtttcctcatgttgtagtagcggacatggcccggaccggccsccgagaccgccccgtgcaacctcaccgccagcctgggggcctcagcgactgggacgggaccaaggggctcggggattctccctgcccccggccctggtgcgtgactgaccctcctgttcccagagcccccagcgcargccgggatgttcgtcctggtggaaatggtggacaccgtccggatccccccttggcagtttgagaggaagctcaacgactccattgccgaggagctgaacaagaagttggccaacaaggtcgtgtacaacgtgggactctgcatttgtctgtttgatatcaccaaactggaggatgcctatgtattccctggggatggcgcatcacacaccaaagtccattttcgctgcgtggtgtttcatccattcctagatgagattctcattgggaagatcaaaggctgcagcccagaaggagtgcacgtctctctaggcttcttcgatgacattctcatccccccagagtcactgcagcagccagccaagttcgacgaagcggagcaggtgtgggtgtgggagtacgagacggaggaaggagcacacgacctctacatggacaccggcgaggagatccgcttccgggtggtggacgagagctttgttgacacgtcccccacarggcccagytcagcagatgccaccantttccantgargagctgccaaagaaggaggctccgttacac

SEQ ID NO: 399 - DNA, 271 bp, Homo sapiens
  misc feature (251): n equals a,t,g, or c
  misc feature (263): n equals a,t,g, or c
tggatttttataaggccagacatttacctctggtaatctcttgagccatgtgtttcatttttatgctcacagaataatttggtgtaatggggcttatyaacccaaatttcagaactttaaattcatgtatctttttctacactgatgactatactcaaagcatcttactttaattatataaatgtatatactgtctttctcaactggggtttcaagagagaattaagcccaaaataaaataatttgtgtgngcttattttctncatttttc

SEQ ID NO: 400 - DNA, 925 bp, Homo sapiens
  misc feature (54): n equals a,t,g, or c
  misc feature (364): n equals a,t,g, or c
  misc feature (635): n equals a,t,g, or c
  misc feature (844): n equals a,t,g, or c
  misc feature (900): n equals a,t,g, or c
ctcgtgccgaattcggcacgagcasgagcgcgtgctcagtgtgctgggtacagncgactccgggacagggggtctcggccgtcggcgtcatggtttcgcgcgtgcagctcccgcctgagatccagctggctcagcgcctggcggggaatgagcaggtgacccgggaccgggcggtgaggaagctccggaaatacatcgtcgccaggactcagcgggccgcagtggttttacgcacgacgagctgctgaaggtgtggaaaggactgttttattgcatgtggatgcaggacaagccactcctccaggaagaattaggaaggactatttcccagctcgttcatgcttttcagaccacggaggcgcanacctgttccttcaggccttctggcagaccatgaatcgcgagtggacgggcattgacaggctgcgctggataaattctacatgctcatgcggatggtcctgaacgagtccttgaaggytctgaagatgcaaggctgggaagaaagacagatcgaggagctgctagagctgctgatgactgaratcctgcaccccagcagccaggcccccaacggtgtgaagagccacttcatcgagatcttcctggaggagctgaccaaagtgggcgccgangsagcttacggcagaccagaacctggaagttcatcgaccccttctgcagaatcgctgcccggaccaaggattccttggttttgaacaacatcactcgaggcatctttgagacgattgtggagcaggccccgcttgccattgaagacctcctgaatgaactggacacacaggatgaggaggtggcgtcggacagtgatgagtcctctganggcggtgaacgttgagacgcgctgtcccagaagaggtctgagaagccgcccgcagnttccatctgcagggctgaacctgag

SEQ ID NO: 401 - DNA, 1085 bp, Homo sapiens
  misc feature (774): n equals a,t,g, or c
  misc feature (1080): n equals a,t,g, or c
  misc feature (1085): n equals a,t,g, or c
cggacgcgtgggtgctggggctgcagmgctgcctccgagaccgcgaggtgggtggagcgggtcttcctggaagggtgcgataaggccgggcgaggtgcctgggatgcttctccccttccgcgaggaagagatctaattgggtagggcgggtgtagactagcctgccgagccgcccgctggcacctgcagcctcctgggcgcccgccgggccccggcgagaaagttgttaaagggagcgaggtggttgttcctggggtccgaggcgcgcctctcacgccctgcccaacagaagccgcagtcccgtggggtctggagacgcagtttcctgttaatgacaataaatccctgctccccctgcctcagacatctacgcagcgaaatcgagcctggccttgagggtccacaccgcgagggaagatgcgtgcgcccattccagagcctaagcctggagacctgattgaratttttcgccctttctacagacactgggccatctatgttggcgatggatatgtggttcatctggcccctccaagtgaggtcgcaggagctggtgcagccagtgtcatgtccgccctgactgacaaggccatcgtgaagaaggaattgctgtatgatgtggccgggagtgacaagtaccaggtcaacaacaaacatgatgacaagtactcgccgctgccctgcagcaaaatcatccagcgggcggaggagctggtggggcaggaggtgctctacaagctgaccagtgagaactgcgagcactttgtgaatganctgcgctatggagtcgcccgcagtgaccaggtcagagatgtcatcatcgctgcaagcgttgcaggaatgggcttggcagccatgagccttattggagtcatgttctcaagaaacaagcgacaaaagcaataactgaaaaagactgtcctgtcagcgatgactttatacatcaagggggtcttgttttgctagagagtttggggtttggtttgtggatttcattgtgatttataataaggcttattttcacagaataaaataaagcaaaacgaaaaaaaaaaaaaaaaaaaaaaaaaaaaaaaaaanggggn

SEQ ID NO: 402 - DNA, 348 bp, Homo sapiens
  misc feature (65): n equals a,t,g, or c
  misc feature (149): n equals a,t,g, or c
  misc feature (308): n equals a,t,g, or c
  misc feature (343): n equals a,t,g, or c
ctttccccaaccccckggsccggggggtttgggcccgggggcccccgggcctttcctttaaaggnaaaacccttwaagggtttggggaaattcccccccccccggggggggccctttgcccaaaggggaaaaattttccgggggccaanccggaaaggccccaaaaaaggttccccccggggaaggaatccccggttggaattgttaaaaccaaaaggggaattttgaaggccggaaattcgggttgccccccaacttcccccaacattcccggggggacttgggggctggaacgatgccttgggagncttcggcaagcttcgcaaggctggttggtcagctngcgca

SEQ ID NO: 403 - DNA, 1470 bp, Homo sapiens
  misc feature (4): n equals a,t,g, or c
tggngctccaccgcggtgacgaccgctctagaactagtggatcccccgggctgcaggaattcggcagaggcagwgccggcgtgggcggccggccgaggcggaggcgcaggaagggggckgcgagtcgtgcgaggctgcccttctcactcagcattatggatccaagcctgttgagagaaagggagctgttcaaaaaacgagctctttctactcctgtagtagaaaaacgttcagcatcttctgagtcatcatcatcatcgtcaaagaagaagaaaacaaaggtagaacatggaggatcgtcaggctctaaacaaaattctgatcatagcaatggatcatttaacttgaaagctttgtcaggaagctctggatataagtttggtgttcttgctaagattgtgaattacatgaagacacggcatcagcgaggagatacgcatcctctaaccttagatgaaattttggatgaaacacaacatttagatattggactcaagcagaaacaatggctaatgactgaggctttagtcaacaatcccaaaattgaagtaatagatgggaagtatgctttcaagcccaagtacaacgtgagagataagaaggccctacttaggctcttagatcagcatgaccagcgaggattaggaggaattcttttagaagacatagaagaagcactgcccaattcccagaaagctgtcaaggctttgggggaccagatactatttgtaaatcgtcccgataagaagaaaatacttttcttcaatgataagagctgtcagttttctgtggatgaagaatttcagaaactgtggaggagtgtcactgtagattccatggacgaggagaaaattgaagaatatctgaagcgacagggtatttcttccatgcaggaatctggaccaaagaaagtggcccctattcagagaaggaaaaagcctgcttcacagaaaaagcgacgctttaagactcataacgaacacttggctggagtgctgaaggattactctgacattacttccagcaaatagggaacagttttgccctggaacagagttacagatacacaatcaagagtgttcttgctgatgctcggggtctgaagactgtcttcctatctgcttcttgcggctgaggagaggagcagttcagtttacaaaacaagtgcaaattaccaaactcaaagcttatttgagtagaatgggctcatgggcaatgtgatgttccctgttaaccttctgttactccctgggagaaaggcgctgagcgtggcatgcaggtgtctttgctgtgtttttctccacttctaaatggttcctggttcctttcttcctcgtttgttactttagagcaagtttgcccatagtcttgaatgcaatatttgtttattccaaaagaacatatttataataaaatcactgtagaaggattaaaaaaaaaaaaaaaaaaaaaaaaaaaaaaggggagggg

SEQ ID NO: 404 - DNA, 2487 bp, Homo sapiens
  misc feature (78): n equals a,t,g, or c
tgcggccgccggtcctccctccacctcctcctcggccccccctcgcttccctcctcccacttcccgagctccggcgtngtcccggccacgctcgacgctgctgcaggaacaaaggaagaccccgcggcggcgcggcgccacctccgcctgctgctccgacccgctcccggcccgcggcggcggcaccagggcgcccggctcagccttcccggaggcctcggcccggcctcatcgtgccggcttcgcgcgcgaacccggctttcgcatttgggaccctgcaggcagaaaaatatggctcaggagactaaccagaccccggggcccatgctgtgtagcacaggatgtggcttttatggaaatcctaggacaaatggaatgtgttcagtttgctacaaagaacatcttcagaggcagcaaaatagtggcagaatgagcccaatggggacagctagtggttccaacagtcctacctcagattctgcatctgtacagagagcagacactagcttaaacaactgtgaaggtgctgctggcagcacatctgaaaaatcaagaaatgtgcctgtggctgccttgcctgtaactcagcaaatgacagaaatgagcatttcaagagaggacaaaataactaccccgaaaacagaggtgtcagagccagttgtcactcagcccagtccatcagtttctcagcccagtacttctcagagtgaagaaaaagctcctgaattgcccaaaccaaagaaaaacagatgtttcatgtgcagaaagaaagttggtcttacagggtttgactgccgatgtggaaatttgttttgtggacttcaccgttactctgacaagcacaactgtccgtatgattacaaagcagaagctgcagcaaaaatcagaaaagagaatccagttgttgtggctgaaaaaattcagagaatataaattacttcttgtgaagagactgaaactttgtttttattttaatatatcgtaggaaaacattaaagagcagatgcatggccatttttctttgatgttctccagagttttacattacacttgtctgtcttataattgatattttaggatgtttgggtgtttgttacaggcagaattggatagatacagccctacaaatgtatatgccctcccctgaaaaaaattggatgaaaatctgcacagcaaagtgaaacacacagataataggaacaaaatgtagttcccatgtgccaaacaaaataaatgaaatctctgcatgtttgcagcatatctgccttttgggaatgtaatcaaggtataatctttggctagtgttatgtgcctgtatttttttaaaatggtacaccagaaaaggactggcagtctacttctaccatagttaaacttcaccctctttaatttcacaacatattctttggaagcaggaagaaatgctcataaagaggatcagaccttctttcccgtgaaaccagtatttggcgccatatataagcctggttaaattggtcatctaaagctgtcaaataagacattctgtgaaaggtaaacatcgaaactggttataagtaaaaccatcaagccaacaacagggtcttgagataacctttgaagcttattgtactggcctgcaccagaagatgtctgcattactcattgctaaaaatgtgtagcacagaactgcactaggattaatttgtttacaagaagaaatttaaactctacgtttggttttcacatacagcagctctattgaataacatgcatctgaattttaagttgcaaaggtatctgaataatttttcatgtgcatcttttgtcgaatgttttggttcaagaaagaatgtttaaagctttttaaaagacttcagttcttaatgtaactgtacccttctgcatggaaaatcataaccaacatggctgcagtagacttcttagtggtatccagcrccacttgcagagggctgctttatcatattgtacttgggtgtaggactctagtgttcttgggtgtattgcatgggctgcattatctacagcattgtacaataacaactagaaaaggcagtatacttcactgatgcttgtctggtaataatcacttctgtgttataatggaaggttttttgtgatgtatgaaacttgtgttttttatatataaatgagtatagttagtgttgtggtaatgcctgttttcatctgtaaatagttaagtatgtacacgaggcactacttctgatttattgcaatgttcagtcctagtttttacttttattcttaaagcattcagttttgctttcaattttatgtaccttagttctgagttagacctgcagatgtgtacagatagttcatatttatgtattgcacataatcatgctattcagcattgatgctatattgtattatgtaaataataaaagccatgtacagagggaaaaaaaaaaaaaaaaaaaaaaaactcgagactagttctctctctctctctctcctcgtgcc

SEQ ID NO: 405 - DNA, 1256 bp, Homo sapiens
  misc feature (1180): n equals a,t,g, or c
ggcctcctgcctgtagtgtgtgggctggggttggtgcgagcttccagcttggccgcagttggttcgtagttcggctctggggtcttttgtgtccgggtctggcttggctttgtgtccgcgagtttttgttccgctccgcagcgctcttcccgggcaggagccgtgaggctcggaggcggcagcgcggtccccggccaggagcaagcgcgccggcgtgagcggcggcggcaaaggctgtggggagggggcttcgcagatccccgagatgccggagttcctggaagacccctcggtcctgacaaaagacaagttgaagagtgagttggtcgccaacaatgtgacgctgccggccggggagcagcgcaaagacgtgtacgtccagctctacctgcagcacytcacggctcgcaaccggccgccgctccccgccggcaccaacagcaaggggcccccggacttctccagtgacgaagagcgcgagcccaccccggtcytcggctctggggccgccgccgcgggccggagccgagcaccgtcggcaggaaagccacaaaaaaaactgataaacccagacaagaagataaagatgatctagatgtaacagagctcactaatgaagatcttttggatcagcttgtgaaatacggagtgaatcctggtcctattgtgggaacaaccaggaagctatatgagaaaaagcttttgaaactgagggaacaaggaacagaatcaagatcttctactcctctgccaacaatttcttcttcagcagaaaatacaaggcagaatggaagtaatgattctgacagatacagtgacaatgaagaaggaaagaagaaagaacacaagaaagtgaagtccactagggatattgttcctttttctgaacttgggaactactccctctggtggtgggattttttcagggtatttcttttcctgaaatctccacccgtcctcctttgggcagtaccgaactacaggcagctaagaaagtacatacttctaagggrgacctacctagggagcctcttgttgccacaaacttgcctggcaggggacagttgcagaagttagcctctgaaaggaatttgtttatttcatgcaagtctagccatgataggtgtttagaggaaaagttcttcgtcatcttctcagcctggaacacagtgccatgttngtgtctactgcagcttttcctttcactgattaaagaaaccaccactggtttattataaaggcatagtaggaaaata

SEQ ID NO: 406 - DNA, 771 bp, Homo sapiens
  misc feature (200): n equals a,t,g, or c
  misc feature (205): n equals a,t,g, or c
gttcttctaaatcaggaatggattgaaatctaatgaaccgaaactttgggtacttcggccttcaaggggctcctttattgagaatcaatgtcttctcctaggtaattgatcaccctagacccagggacacccaattcatcgtaatcatcatgaataatcaaaaagtggtagctgtgctactgcaagagtgcaagcaagtnctggntcagctcttgttggaagcgccagatgtgtcggaagaggacaagagcgaggaccagcgctgcagagctttactccccagcgagttaaggaccctgatccaggaggcaaaggaaatgaagtggcccttcgtgcctgaaaagtggcagtacaaacaagccgtgggcccagaggacaaaacaaacctkaaggatgtgattggcgccgggttgcagcagttactggcgtccctgagggcctccatcctcgctcgggactgtgcggctgcggcggctattgtgttcttggtggaccggttcctgtatgggstcgacgtctctggaaaacttctgcaggtcgccaaaggtctccacaagttgcagccagccacgccaattgccccgcaggtggttattcgccaagcccgaatctccgtgaaytcaggaaaacttttaaaagcagagtatattctgagcagtctaataagcaacaatggagcaacgggtacctggctgtacagaaatgaaagtgacaaggtcctggtgcagtcggtctgtatacagatcagagggcagattctgcaaaagctgg

SEQ ID NO: 407 - DNA, 2643 bp, Homo sapiens
ctttggacaggactatcaaggtgtggcagttgggctcttcgtcaccaaacttcactttggaaggacatgagaaaggcgtgaattgcattgattactacagtggtggggacaagccatacctcatttcaggtgcagatgaccgtcttgttaaaatatgggattatcagaataaaacatgtgtgcagacactggaaggacatgcccaaaatgtgtcttgtgccagctttcatcctgagttgccaatcattatcacaggttcagaagatggaacagtacgtatttggcattcaagcacctaccggcttgagagcacactgaattatggaatggagagggtatggtgcgtggccagtctaagagggtcaaacaatgtcgctttgggctatgatgaagggagcatcattgttaagcttggtcgggaggaacctgccatgtccatggatgccaatggaaagataatttgggccaagcattcagaagtccagcaggccaacctaaaagcaatgggagatgctgaaattaaagatggtgaaagattgccactggcagtaaaggatatgggcagttgtgaaatataccctcagactattcagcacaatcctaatgggcggtttgtggtggtgtgtggtgatggggagtatatcatctacacagcaatggcattgagaaacaagagctttggatctgctcaggagtttgcatgggcccacgattcttcagagtatgcaataagagagagcaacagcattgtaaagatatttaagaactttaaggaaaaaaaatcatttaaaccagattttggagcagaaagtatctacggcggcttcttattgggagtcagatctgtaaatggcttagccttctatgactgggacaatacagaactcatacgaagaattgaaattcagcccaaacatattttctggtctgactctggagagctagtctgtattgctactgaggaatcattttttatccttaagtatctgtcagaaaaagtcttggctgcacaggaaacacatgagggagttactgaagatggcattgaagatgcctttgaggttcttggtgagattcaggaaattgtgaaaacagggctttgggtaggcgattgcttcatttacacaagttctgtgaacagattaaattattatgttggaggagaaatagtcaccattgcccacttggacaggacgatgtatctcctaggctacattcctaaagacaacaggctttatctgggggataaagaattgaacatcattagctattccctgctggtttcagtcctggaataccagacagctgtcatgcggagggactttagcatggctgataaggtccttcctaccattccaaaagaacagaggaccagagttgcacactttttggaaaagcagggcttcaagcagcaagctcttacagtatccacagatcctgagcatcgttttgagcttgctcttcagcttggagagttaaaaattgcataccagttagcagtggaagcagagtcagaacagaagtggaaacaacttgctgaacttgccattagtaaatgtcagtttggcctagcccaggagtgcctgcatcatgcacaggattatgggggcctgctgcttttggccactgcctctggaaatgctaatatggtgaacaagctagcagagggtgcggagagagatggcaaaaataatgtggcattcatgagctactttttacagggcaaggttgatgcctgcctagagctcttaattagaactggacggctgccagaagctgccttcttggcccgaacttacttacccagtcaggtttcaagggtagtgaaactctggagagagaatctctcaaaagtcaatcagaaagcagcagaatcccttgctgacccaacagagtatgaaaacctgttccctggattaaaagaagcctttgttgttgaagaatgggtgaaggaaacacatgctgatctgtggccagccaaacaatacccacttgtcacgccaaatgaagagagaaatgtcatggaagagggaaaagactttcagccctcaagatctacagctcaacaggaacttgatgggaaacctgcttctcctactccggttattgtggcctcccacacagccaacaaagaagaaaagagtttactcgaactagaagtagatttggataatttggaattagaagatattgacacaacagatatcaatctggatgaagatattttggatgattgactgtaatgctttccatttacctgactaaacagatcattattatatataggtattgattgctaccctgaccacagtgctttggactatgagaaacttcttagatttttatatgtaaatgctgtggaccactgggagcacaatgcccacatcatcttaagaagagtttatgtgcagcatttaaatcactgtgttttccttgttaactaaaacagacatgggctttgatttttttcatactattagaccatatctcataaaaccttttgaattaatgaaggtacttgtttcctttctcaataatgaaaataggcttctagttttagaaggctgagccgaaactacaccttgcctagggatcagccccactgtcttttctttgtataactwaatctgcattttcaaatgt

SEQ ID NO: 408 - DNA, 1646 bp, Homo sapiens
  misc feature (55): n equals a,t,g, or c
caacactgtggttatgaaggtggcagagcagacccccctctctgccctgtatttngcctccctcatcaaggaggcaggctttccccctggggtggtgaacatcatcacggggtatggcccaacagcaggtgcggccatcgcccagcacatggatgttgacaaagttgccttcaccggttccaccgaggtgggccacctgatccagaaagcagctggcgattccaacctcaagagagtcaccctggagctgggtggtaagasccccagcatcgtgctggccgatgctgacatggagcatgccgtggagcagtgccacgaagccctgttcttcaacatgggccagtgctgctgtgctggctcccggaccttcgtggaagaatccatctacaatgagtttctcgagagaaccgtggagaaagcaaagcagaggaaagtggggaacccctttgagctggacacccagcaggggcctcaggtggacaaggagcagtttgaacgagtcctaggctacatccagcttggccagaaggagggcgcaaaactcctctgtggcggagagcgtttcggggagcgtggtttcttcatcaagcctactgtctttggtggcgtgcaggatgacatgagaattgccaaagaggagatctttgggcctgtgcagcccctgttcaagttcaagaagattgaggaggtggttgagagggccaacaacaccaggtatggcctggctgcggctgtgttcacccgggatctggacaaggccatgtacttcacccaggcactccaggccgggaccgtgtgggtaaacacctacaacatcgtcacctgccacacgccatttggagggtttaaggaatctggaaacgggagggagctgggtgaggatgggcttaaggcctacacagaggtaaagacggtcaccatcaaggttcctcagaagaactcgtaagagcagctgtcagggaggcccagtcacagtccagcaattccacaaccaccttgaccaatgcttgccaagctgttttaaagccaagaacaccctttctttgttccaaattaactcttagaagaaaccccacaaataaagcaattcaatcaaggctgttctatttaaatcagagatggggaccaggctcagagttctacctatctaacccccaaccacagcccccttggtggcccatgagttgcttccatgaaatcttaggagtctctggaggacagattaaaaaccagtgatctgtaatttgtagctcttcctgctgatccaaggactttcccatgggtgcgcttgatggtttagtggatcgactcaactcagaacacaagcttggaaagtgttaggggttttgaactaggtggatactaaatctcggccccactcttcattggcttaacctaaaaaccagaggtgcttttccttgtctgtgtgccagttgctggctgttttagttgcttgcccttcattttgctactgattttccttaatttgtgggaaggagtaggcaaagaatatgcttacatgattacacctgtaaagtaagcccaaacatyccaaatgtccatcaactgatgagtggattaataaaatgtttccatggaaaaaaaaaaaaaaaaaaaaaaaaaaaaaaaaaaaaaaaaaaaaaaaa

SEQ ID NO: 409 - DNA, 876 bp, Homo sapiens
  misc feature (146): n equals a,t,g, or c
ctgcacccaggtgaaatagacagccatgttgctcacacaaagcctgtttgctggtctcttcacactgactcgagtgaaatttggtgccgtgactaggatcgggggacctcccttgggagatcaatcccccgtcctcctacactttnctctgtgagaaagatccacctacaacctcaggtcctcagaccraccagcccaagaaacatctcaccaatttcaaatctggcacccactggaaatcagactgcccagctcgcccgacagccactcctggagcccctaaagctctagcccaaggctctctgactccttcccagatctattcggcttagcgactgaagattgacgctgcccgatcgcctcggaagtcccctggaccatcacagaagccgagcttcgggtaactctcacagtggagggtaagtccatcccctgtttaatcgatacgggggctacccactccacgttgccttcttttcaagggcctgtttcccttgcccccataactgttgtgggtattgacggccaagcttcaaaacccctgaaaactcccccactctggtgccaacttggacaacactcttttatgcactcttttttagttatccccacctgcccacttcccttattaggccgaaatattttaaccaaattatctgcttccctgactattcctggagtacagctacatctcattgctgcccttcttcccaatccaaagcctcctttgtgtcctctaacatccccacaatatcaccccttaccacaagacctcccttcagcttaatctctcccactctaggttcccacgccgcccctaatcccacttgaagcagccctgagaaacatcgtccattctctctccataccaccccc

SEQ ID NO: 410 - DNA, 1850 bp, Homo sapiens
  misc feature (1817): n equals a,t,g, or c
  misc feature (1848): n equals a,t,g, or c
gcccacgcgtccgcggacgcgtggggccatttttgctgcccggacgcggagcgagaggctgagagagtcggagacactatccgcttccatccgtcgcgcagaccctgccggagccgctgccgctatggatgatcgagaggatctggtgtaccaggcgaasctggccgagcaggctgagcgatacgacgaaatggtggagtcaatgaagaaagtagcagggatggatgtggagctgacagttgaagaaagaaacctcctatctgttgcatataagaatgtgattggagctagaagagcctcctggagaataatcagcagcattgaacagaaagaagaaaacaagggaggagaagacaagctaaaaatgattcgggaatatcggcaaatggttgagactgagctaaagttaatctgttgtgacattctggatgtactggacaaacacctcattccagcagctaacactggcgagtccaaggttttctattataaaatgaaaggggactaccacaggtatctggcagaatttgccacaggaaacgacaggaaggaggctgcggagaacagcctagtggcttataaagctgctagtgatattgcaatgacagaacttccaccaacgcatcctattcgcttaggtcttgctctcaatttttccgtattctactacgaaattcttaattcccctgaccgtgcctgcaggttggcaaaagcagcttttgatgatgcaattgcagaactggatacgctgagtgaagaaagctataaggactctacacttatcatgcagttgttacgtgataatctgacactatggacttcagacatgcagggtgacggtgaagagcagaataaagaagcgctgcaggacgtggaagacgaaaatcagtgagacataagccaacaagagaaaccatctctgaccaccccctcctccccatcccaccctttggaaactccccattgtcactgagaaccaccaaatctgacttttacatttggtctcagaatttaggttcctgccctgttggttttttttttttttttttaaacagttttcaaaagttcttaaaggcaagagtgaatttctgtggattttactggtcccagcttttaggttctttaagacactaacaggactacatagaggctttttcagcattactgtgtcgtctccgtgccagatgtggcaagatcaccattagcaaatggaaattacatttgaaagccattagacttataggtgatgcaagcatctaagagagaggttaatcacactatagaggcataagtggtatcagttttcatttttctaattgtttaaactgtgttttataccagtgtttgcaagtaattgggtgttagcttgagatggttaaaggtggtttggggagggacttcgttgtaatggttttgctgtaaaaaatgtttccaactccgctgaaatgttgctgaaaagcatggtgctggtaacagttcaacaatccgtggctgctcattcttgcctactttactctcccactgaagcaggttagcgttgaaggtggtatggaaaagcctgcatgcctgttcaattcttttgtttcttctccttccccctccccctacctccttcccctcactcctcccctccttcgctcgctcaacctcttttgttcagtatgtgtaacttgaagctaatttgtactactggatatctgactggagccacagatacagaatctgtattgttcttactgaaacacagcatggaattaacattaaacttaaataaaacaaacctaaattaaaaaaaaaaaaaaaaaaaaacamggggngggcccggtacccattscccctaaagggggngg

SEQ ID NO: 411 - DNA, 661 bp, Homo sapiens
  misc feature (518): n equals a,t,g, or c
  misc feature (567): n equals a,t,g, or c
  misc feature (568): n equals a,t,g, or c
  misc feature (648): n equals a,t,g, or c
  misc feature (660): n equals a,t,g, or c
acactatagaaatgtacgcctgcaggttaccggtccggaaattcccgggtcgacccacgcgtccggtggttgactctgaggatctgcccctgaaacatctcccgagaaatgctccagcagagcaaaatcttgtaaagtcattcgcaaaaacattgttaagaagtgccttgagctcttctctgagctggcagaagacaaggagaattacaagaaattctatgaggcattctctaaaaatctcaagcttggaatccacgaagactccactaaccgccgccgcctgtctgagctgctgcgctatcatacctcccagtctggagatgagatgacatctctgtcagagtatgtttctcgcatgaaggagacacagaagtccatctattacatcactggtgagagcaaagagcaggtggccaactcagcttttgtggarcgagtgcggaaacggggcttcsaagtggtwtatatgamcgarcccattgacrartwctgtgtgcagcarctcmaggaatttgawnggaararmctggtcycagttaccaaggaggtctggarctgcctgaggtnnaggagagaagaagaagatggaagagagcaaggcaagtttagaccttgcagctctgaagaatcttagttaaagttagaagngcatcccatagnt

SEQ ID NO: 412 - DNA, 1263 bp, Homo sapiens
cgtccgctctagaactagtggatcccccgggctgcaggaattcggcacgagctccatcttaaagaagatcagacagagtacctagaagagaggcgggtcaaagaagtagtgaagaagcattctcagttcataggctatcccatcaccctttatttggagaaggaacgagagaaggaaattagtgatgatgaggcagaggaagagaaaggtgagaaagaagaggaagataaagatgatgaagaaaagcccaagatcgaagatgtgggttcagatgaggaggatgacagcggtaaggataagaagaagaaaactaagaagatcaaagagaaatacattgatcaggaagaactaaacaagaccaagcctatttggaccagaaaccctgatgacatcacccaagaggagtatggagaattctacaagagcctcactaatgactgggaagaccacttggcagtcaagcacttttctgtagaaggtcagttggaattcagggcattgctatttattcctcgtcgggctccctttgacctttttgagaacaagaagaaaaagaacaacatcaaactctatgtccgccgtgtgttcatcatggacagctgtgatgagttgataccagagtatctcaattttatccgtggtgtggttgactctgaggatctgcccctgaacatctcccgagaaatgctccagcagagcaaaatcttgaaagtcattcgcaaaaacattgttaagaagtgccttgagctcttctctgagctggcagaagacaaggagaattacaagaaattctatgaggcattctctaaaaatctcaagcttggaatccacgaagactccactaaccgccgccgcctgtctgagctgctgcgctatcatacctcccagtctggagatgagatgacatctctgtcagagtatgtttctcgcatgaaggagacacagaagtccatctattacatcactggtgagagcaaagagcaggtggccaactcagcttttgtggagcgagtgcggaaacggggcttcgaggtggtatatatgaccgagcccattgacgagtactgtgtgcagcagctcaaggaatttgatgggaagagcctggtctcagttaccaaggagggtctggagctgcctgaggatgaggaggagaagaagaagatggaagagagcaaggcaaagtttgagaacctctgcaarctcatggggtatatgatggccaaaaagcactggagatcaaccctgaccaccccatttttggag

SEQ ID NO: 413 - DNA, 1337 bp, Homo sapiens
taactcacgtttytytttcttcctgtctgcttggaaagatggcgtcccgcaaggaaggtaccggctctactgccacctcttccagctccaccgccggcgcacagggaaaggcaaaggcaaaggcggctcgggagattcagccgtgaagcaagtgcagatagatggccttgtggtattaaagataatcaaacattatcaagaagaaggacaaggaactgaagttgttcaaggagtgcttttgggtctggttgtagaagatcggcttgaaattaccaactgctttcctttccctcagcacacagaggatgatgctgactttgatgaagtccaatatcagatggaaatgatgcggascttcgccatgtaaacattgatcatcttcacgtgggctggtatcagtccacatactatggctcattcgttacccgggcactcctggactctcagtttagttaccagcatgccattgaagaatctgtcgttctcatttatgatcccataaaaactgcccaaggatctctctcactaaaggcatacagactgactcctaaactgatggaagtttgtaaagaaaaggatttttcccctgaagcattgaaaaaagcaaatatcacctttgagtacatgtttgaagaagtgccgattgtaattaaaaattcacatctgatcaatgtcctaatgtgggaacttgaaaagaagtcagctgttgcagataaacatgaattgctcagccttgccagcagcaatcatttggggaagaatctacagttgctgatggacagagtggatgaaatgagccaagatatagttaaatacaacacatacatgaggaatactagtaaacaacagcagcagaaacatcagtatcagcagcgtcgccagcaggagaatatgcagcgccagagccgaggagaacccccgctccctgaggaggacctgtccaaactcttcaaaccaccacagccgcctgccaggatggactcgctgctcattgcaggccagataaacacttactgccagaacatcaaggagttcactgcccaaaacttaggcaagctcttcatggcccaggctcttcaagaatacaacaactaagaaaaggaagtttccagaaaagaagttaacatgaactcttgaagtcacaccagggcaactcttggaagaaatatatttgcatattgaaaagcacagaggatttctttagtgtcattgccgattttggctataacagtgtctttctagccataataaaataaaacaaaatcttgactgcttgctcatttraaaaaaaaaaaaaaaaaccccaagggggggccsggtcccattccccccttttg

SEQ ID NO: 414 - DNA, 792 bp, Homo sapiens
  misc feature (744): n equals a,t,g, or c
  misc feature (783): n equals a,t,g, or c
ggcacgaaggggacgtgggaaagtgttagcggggaacgctgggaaactcccggcctccgccaccatcttgctttcctttaatccggcagtgaccgtgtgtcagaacaatcttgaatcatgaagctactaaccagagccggctctttctcgagattttattccctcaaagttgcccccaaagttaaagccacagctgcgcctgcaggagcaccgccacaacctcaggaccttgagtttaccaagttaccaaatggcttggtgattgcttctttggaaaactattctcctgtatcaagaattggtttgttcattaaagcaggcagtagatatgaggacttcagcaatttaggaaccacccatttgctgcgtcttacatccagtctgacgacaaaaggagcttcatctttcaagataacccgtggaattgaagcagttggtggcaaattaagtgtgaccgcaacaagggaaaacatggcttatactgtggaatgcctgcggggtgatgttgatattctaatggagttcctgctcaatgtcaccacagcaccagaatttcgtcgttgggaagtagctgaccttcagcctcagctaaagattgacaaagctgtggcctttcagaatccgcagactcatgtcattgaaaatttgcatgcagcagcttaccggaatgccttggctaatcccttgkattgtcctgactataggattggaaaagtgacatcagaggaggtaccaakraaactntaaagaaattggcgctagaatacttggagcaatggcagnatcaataga

SEQ ID NO: 415 - DNA, 1342 bp, Homo sapiens
  misc feature (1036): n equals a,t,g, or c
  misc feature (1038): n equals a,t,g, or c
  misc feature (1099): n equals a,t,g, or c
  misc feature (1181): n equals a,t,g, or c
  misc feature (1224): n equals a,t,g, or c
  misc feature (1246): n equals a,t,g, or c
  misc feature (1255): n equals a,t,g, or c
  misc feature (1338): n equals a,t,g, or c
gcccctccgggttaggcggctgtagcggagctcgaaaagagtggcgcagggtcgcgcggccccgcctccttccccgcccagcgaagctctctgaccacccctcttttctagagttctgcctcgcttcccggcgcggtcgcagccctcagcccacttaggataatggcgacagctgaggtactgaacattggtaaaaaattatatgagggtaaaacaaaagaagtctacgaattgttagacagtccaggaaaagtcctcctgcagtccaaggaccagattacagcaggaaatgcagctagaaaaaaccacctggaaggaaaagctgcaatctcaaataaaatcaccagttgtatttttcagttattacaggaagcaggtattaaaactgccttcaccagaaaatgtggggagacagctttcattgcaccgcagtgtgaaatgattccaattgaatgggtttgcagaagaatagcaactggttcttttctcaaaagaaatcctggtgtcaaggaaggatataagttttacccacctaaagtggagttgtttttcaaggatgatgccaataatgacccacagtggtctgaggaacagctgattgctgcaaaattttgctttgctggacttcttataggccagactgaagtggatatcatgagtcatgctacacaggctatatttgaaatactggagaaatcctggttgccccagaattgtacactggttgatatgaagattgaatttggtgttgatgtaaccaccaaagaaattgttcttgctgatgttattgacaatgattcctggagactctggccatcaggagatcgaagccaacagaaagacaaacagtcttatcgggacctcaaagaagtaactcctgaagggctccaaatggtaaagaaaaactttgagtgggttgcagagagagtagagttgcttttgaaatcagaaagtcagtgcagggttgtagtgttgatgggctctacttctgatcttggtcactgtgaaaaaatcaagaaggcctgtggaaattttngncattccatggtgaacttcgagtaacatcctgcgccataaaggaccagatgaaactcctgangatttaaagcctgagtatgaaaggggatggccattcctaccggtaatttggtggccagtggccaggcagaaggttaatgggntttggggaccagttgaatggtcctggggaacacctgccatatnccaggttatccagcctgtcctnccccttaanacccagacctggggaattccaggatgttgtggtcctccccttcgactacccagtggtcctggctgttcaacccgtaccttttnccag

SEQ ID NO: 416 - DNA, 1113 bp, Homo sapiens
ggcatagcccggctcggcctgtaaagcagtctcaagcctgccgcaggagaagatggcggtcgccgtragaactttgcaggaacagctggaaaaggccaaagagagtcttaagaacgtggatgagaacattcgcaagctcaccgggcgggatccgaatgacgtgaggcccatccaagccagattgctggccctttctggtcctggtggaggtagaggacgtggtagtttattactgaggcgtggattctcagatagtggaggaggacccccagccaaacagagagaccttgaaggggcagtcagtaggctgggcggggagcgtcggaccagaagagaatcacgccaggaaagcgacccggaggatgatgatgttaaaaagccagcattgcagtcttcagttgtagctacctccaaagagcgcacacgtagagaccttatccaggatcaaaatatggatgaaaagggaaagcaaaggaaccggcgaatatttggcttgttgatgggtacccttcaaaaatttaaacaagaatccactgttgctactgaaaggcaaaagcggcgccaggaaattgaacaaaaacttgaagttcaggcagaagaagagagaaagcaggttgaaaatgaaaggagagaactgtttgaagagaggcgtgctaaacagacagaactgcggcttttggaacagaaagttgagcttgcgcagctgcaagaagaatggaatgaacataatgccaaaataattaaatatataagaactaagacaaagccccatttgttttatattcctggaagaatgtgtccagctacccaaaaactaatagaagagtcacagagaaaaatgaacgctttatttgaaggtagacgcatcgaatttgcagaacaaataaataaaatggaggctaggcctagaagacaatcaatgaaggaaaaagagcatcaggtggtgcgtaatgaagaacagaaggcggaacaagaagagggtaaggtggctcagcgagaggaagagttggaggagacaggtaatcagcacaatgatgtagaaaagaaagaaaagaaaggaaaggaagaaaagaaggaaagaaagaaaagaaaagaaaggaaagaaaagaaaac

SEQ ID NO: 417 - DNA, 1174 bp, Homo sapiens
  misc feature (2): n equals a,t,g, or c
  misc feature (7): n equals a,t,g, or c
gnccacncgtccggtgacgtacatccggcgagtagctggcggtcccgggtgctgctggttagtgtgctctgagggagggtccgagccagccgctgttttgccggaggagcccctcaggccgtagtaagcattaataatgtctttcatctttgagtggatctacaatggcttcagcagtgtgctccagttcctaggactgtacaagaaatctggaaaacttgtattcttaggtttggataatgcaggcaaaaccactcttcttcacatgctcaaagatgacagattgggccaacatgttccaacactacatccgacatcagaagagctaacaattgctggaatgacctttacaacttttgatcttggtgggcacgagcaagcacgtcgcgtttggaaaaattatctcccagcaattaatgggattgtctttctggtggactgtgcagatcattctcgcctcgtggaatccaaagttgagcttaatgctttaatgactgatgaaacaatatccaatgtgccaatccttatcttgggtaacaaaattgacagaacagatgcaatcagtgaagaaaaactccgtgagatatttgggctttatggacagaccacaggaaaggggaatgtgaccctgaaggagctgaatgctcgccccatggaagtgttcatgtgcagtgtgctcaagaggcaaggttacggcgagggtttccgctggctctcccagtatattgactgatgtttggacggtgaaaataaaagagttttacttctctggactgatcctattcacagcttcctcatgaacttttctaatagaacaaggaaagctctccaaccatgtctggcgttgagaagccaagagtctctgtcaactctctcattgcccagtggtgacatgtgctcttctccacactgttgggaggtaatgctgccccacgtgctggtgcaggtcagtatcctgggacttggaagctggcaggatttgccgggtaaagctgtatgccatcatggggcacctgaaaagraaaacacgtctcaccactgtggttgattcaaaagaaagtgattctattttttaaagaaagcgttgttaatgtaattggtatccctcctaactttttgagttcasaatttacttggtcagattttctattcttttttttttttaaactaatga

SEQ ID NO: 418 - DNA, 673 bp, Homo sapiens
  misc feature (213): n equals a,t,g, or c
  misc feature (506): n equals a,t,g, or c
  misc feature (586): n equals a,t,g, or c
  misc feature (618): n equals a,t,g, or c
  misc feature (661): n equals a,t,g, or c
gtcagtcagtgcgcggccaggtacgggccgacgggcccgcggggccggcgccgccatggcgccgtgtttgatttggatttggagacggaggaaggcagcgagggcgagggcgagccagagctcagccccgcggacgcatgtccccttgccgagttgagggcagctggcctagagcctgtgggacactatgaagaggtgttccaggtgcgaaangtgcaaggcaccaacttgggcaaaatatatgccatgaaagtcctaaggaaggccaaaattgtgcgcaatgccaaggacacagcacacacacgggctgagcggaacattctagagtcagtgaagcacccctttattgtggaactggcctatgccttccagactggtggcaaamtctacctcatccttgagtgcctcagtggtggcgagctcttcacgcatctgggagcgagagggcatcttcctgggaagatacggcctgcttctacctggctgagatcacgctggccctgggncatctccactcccagggcatcatctaccggggacctcaagcccgaggaacatcatggttcagcagccagggcccacatcnaaactgaccgacttttggacttttggcaaggngttttattccatggggggcgcccttcaattgacaactttttgngggcaaccattg

SEQ ID NO: 419 - DNA, 2178 bp, Homo sapiens
cgggcacagcgcacactccccgctcgttggcccgggtatcccagcgcggacccacgcgatacgctgacgccccgacgccgatccggccgagccaagtaagggggacggcccgagacggagaagggagagagtgggagtttcccagcccgcagaactttcgaagttgagaaragaacccctggaacgtgcgctcagcactgggattttctggactcaacgatgactctgaataatgtcaccatgcgccagggcactgtgggcatgcagccacagcagcagcgctggagcatcccagctgatggcaggcatctgatggtccagaaagagccccaccagtacagccaccgcaaccgccattctgctacccctgaggaccactgccgccgaagctggtcctctgactccacagactcagtcatctcctctgagtcagggaacacctactaccgagtggtgctcataggggagcagggggtgggcaagtccactctggccaacatctttgcaggtgtgcatgacagcatggacagcgactgcgaggtgctgggagaagatacatatgaacgaaccctgatggttgatggggaaagtgcaacgattatactcctggatatgtgggaaaataagggggaaaatgaatggctccatgaccactgcatgcaggtcggggacgcatacctgattgtctactcaatcacagaccgagcgagcttcgagaaggcatctgagctgcgaatccagctccgcagggcccggcagacagaggacattyccataattttggttkgcaacaaaagtgacttagtgcggtgccgagaagtgtctgtatcagaagggagagcctgtgcagtggtgtttgactgcaagttcatcgagacctctgcagctgtccagcacaacgtgaaggagctgtttgagggcattgtgcgacaggtgcgccttcggcggagcagcaaggagaagaatgaacggcggctggcctaccagaaaaggaaggagagcatgcccaggaaagccaggcgcttctggggcaagatcgtggccaaaaacaacaagaatatggccttcaagctcaagtccaaatcctgccatgacctctctgtactctaggaacccagggtcacccagatgtccctttgatggccgttgttgaaggccattgggaccaataatctatattagattgaatacttaagttagatgtggtttcccccattgtagcagggagctagcgtattagccttgtgggcaacatgatgcatgggaaatgaaagatttttgtaaaaagtcagtatttatttccaggaaaagcctgaccttgctatttgaacacccaagactctttagaggatgtgtttggtgttcacatgtgtttcttctattttggatagtagrgaagtaaagcttacaaagaatgcctagaacaagaacttttcatcattaaaaatttttcccagtgttctgatatgtgactttgaggccaatgagtcataaacaaatataagaaagctgtcaatgagtttcttcaaaggagggaaaactttctacgaatctaagatccatggagctagaattgtagaactaggctcatcagaatcgtgactattattgctccatcaaactgtgaaaagaaatgatgtggaccttgctggaaacaaaggcttagcaaacaatttttgttcaatgcccaccgagacatatagaattgggaactgatacatgtgtcccttataggctcaaaaattatatcttacaatttcttatttagggggaaattatttgaatcagattctatttagtcaaaccaccttttatgttttattatttttgaattcatggagccatcataaaaatatttttaaaatcagaattattgataccctgtagtgcaaaatgtcaatttttaatgtataatcagaagtctgaatttttataaaacatatagcataaaaacttccagtactttggttgacccttgtatgtcacagctctgctctatttattattattttgcaaaataaccattttaacatttgataaagcatatttatgaacatatttcttaataagaaaaatatccattttattaccattttctatctttttcaaaatatgcaagtttttacctatatgtcttataataaaagaaataaaatatttgaaaaaaaaaaaaaaaaa

SEQ ID NO: 420 - DNA, 1884 bp, Homo sapiens
  misc feature (56): n equals a,t,g, or c
  misc feature (283): n equals a,t,g, or c
cccacgcgtccgctctcctcaaatctccacctgatatcaccaacttggaagtcctnaatgtccccatggggggtgttccttccagactccgccaactgtgaattgcctttgttaaccccgtgcagcaaggctgtgatgagtcaagccttaaaagctaccttcagtggcttcaaaaaggaacagcggcgcctgggcattccaaagaacccctggctgtggagtgagcaacaggtatgccagtggcttctctgggccaccaatgagttcagtctggtgaacgtgnaatctgcagaggttcggcatgaatggccagatgctgtgtaaccttggcaaggaacgctttctggagctggcacctgactttgtgggtgacattctctgggaacatctggagcaaatgatcaaagaaaaccaagaaaagacagaagatcaatatgaagaaaattcacacctcacctccgttcctcattggattaacagcaatacattaggttttggcacagagcaggcgccctatggaatgcagacacagaattaccccaaaggcggcctcctggacagcatgtgtccggcctccacacccagcgtactcagctctgagcaggagtttcagatgttccccaagtctcggctcagctccgtcagcgtcacctactgctctgtcagtcaggacttcccaggcagcaacttgaatttgctcaccaacaattctgggacgcccaaagaccacgactcccctgagaacggtgcggacagcttcgagagctcagactccctcctccagtcctggaacagccagtcgtccttgctggatgtgcaacgggttccttccttcgagagcttcgaagatgactgcagccagtctctctgcctcaataagccaaccatgtctttcaaggattacatccaagagaggagtgacccggtggagcaaggcaaaccagttatacctgcagctgtgctggccggcttcacaggaagtggacctattcagctgtggcagtttctcctggagctgctatcagacaaatcctgccagtcattcatcagctggactggagacggatgggagtttaagctcgccgaccccgatgaggtggcccgccggtggggaaagaggaaaaataagcccaagatgaactacgagaagctgagccggggcttacgctactattacgacaagaacatcatccacaagacgtcggggaagcgctacgtgtaccgcttcgtgtgcgacctccagaacttgctggggttcacgcccgaggaactgcacgccatcctgggcgtccagcccgacacggaggactgaggtcgccgggaccaccctgagccggccccaggctcgtggactgagtgggaagcccatcctgaccagctgctccgaggacccaggaaaggcaggattgaaaatgtccaggaaagtggccaagaagcagtggccttattgcatcccaaaccacgcctcttgaccaggctgcctcccttgtggcagcaacggcacagctaattctactcacagtgcttttaagtgaaaatggtcgagaaagaggcaccgggaagccgtcctggcgcctggcagtccgtgggacgggatggtctggctgtttgagattctcaaaggagcgagcatgtcgtggacacacacagactatttttagattttcttttgccttttgcaaccaggaacagcaaatgcaaaaactctttgagagggtaggagggtgggaaggaaacaaccatgtcatttagaagttagtttgkatatattattataatcttataattgttctmagaatcccttaacagttgtatttaacagaaattgtatattgtaatttaaaataattatataactgtatttgaaataagaaaaaaaaaaaa

SEQ ID NO: 421 - DNA, 622 bp, Homo sapiens
cgcggttaaatccccgcacctgagcatcggctcacacctgcaccccgcccgggcatagcaccatgcctgcttgtcgcctaggcccgctagccgccgccctcctcctcagcctgctgctgttcggcttcaccctagtctcaggcacaggagcagagaagactggcgtgtgccccgagctccaggctgaccagaactgcacgcaagagtgcgtctcggacagcgaatgcgccgacaacctcaagtgctgcagcgcgggctgtgccaccttctgctctctgcccaatgataaggagggttcctgcccccaggtgaacattaactttccccagctcggcctctgtcgggaccagtgccaggtggacagccagtgtcctggccagatgaaatgctgccgcaatggctgtgggaaggtgtcctgtgtcactcccaatttctgagctccagccaccaccaggctgagcagtgaggagagaaagtttctgcctggccctgcatctggttccagcccacctgccctcccctttttcgggactctgtattccctcttgggctgaccacagcttctccctttcccaaccaataaagtaaccactttcagcaaaaaaaaaaaaaacttgggggg

SEQ ID NO: 422 - DNA, 1285 bp, Homo sapiens
tcgacccacgcgtccgcgcacgcgtccggaagttggcgtgcagctgggagagctagactaagttggtcatgatgcagaagctactcaaatgcagtcggcttgtcctggctcttgccctcatcctggttctggaatcctcagttcaaggttatcctacgcagagagccaggtaccaatgggtgcgctgcaatccagacagtaattctgcaaactgccttgaagaaaaaggaccaatgttcgaactacttccaggtgaatccaacaagatcccccgtctgaggactgacctttttccaaagacgagaatccaggacttgaatcgtatcttcccactttctgaggactactctggatcaggcttcggctccggctccggctctggatcaggatctgggagtggcttcctaacggaaatggaacaggattaccaactagtagacgaaagtgatgctttccatgacaaccttaggtctcttgacaggaatctgccctcagacagccaggacttgggtcaacatggattagaagaggattttatgttataaaagaggattttcccaccttgacaccaggcaatgtagttagcatattttatgtaccatggttatatgattaatcttgggacaaagaattttatagaaatttttaaacatctgaaaaagaagcttaagttttatcatccttttttttctcatgaattcttaaaggattatgctttaatgctgttatctatcttattgttcttgaaaatacctgcattttttggtatcatgttcaaccaacatcattatgaaattaattagattcccatggccataaaatggctttaaagaatatatatatatttttaaagtagcttgagaagcaaattggcaggtaatatttcatacctaaattaagactctgacttggattgtgaattataatgatatgccccttttcttataaaaacaaaaaaaaaataatgaaacacagtgaatttgtagagtgggggtatttgacatattttacagggtggagtgtactatatactattacctttgaatgtgtttgcagagctagtggatgtgtttgtctacaagtatgattgctgttacataacaccccaaattaactcccaaattaaaacacagttgtgctgtcaatacctcatactgctttacctttttttcctggatatctgtgtattttcaaatgttactatatattaaagcagaaatataaccaaaaaaaaaaaaaaaagggsggccscyctagaggatccggcgaggggccctaaacttaa

SEQ ID NO: 423 - DNA, 528 bp, Homo sapiens
  misc feature (442): n equals a,t,g, or c
  misc feature (485): n equals a,t,g, or c
  misc feature (489): n equals a,t,g, or c
  misc feature (510): n equals a,t,g, or c
ggcggcgcctgctctgtagagccggcggaaccgggtagcttggccaggttgtgaggaaccgcagcgcgccgcaggaccgggccgctgagcctgcagccgccccgcgccgtgacctgcgaccctagaccccgactccctttggctcagcccgcgcgccccaggcccggcccgggcggcgcgacgggaggatgagcggcgggcggcggaaggaggagccgcctcagccgcagctggccaacggggccctcaaagtctccgtctggagtaaggtgctgcggagcgacgcggcctgggaggataaggatgaatttttagatgtgatctactggttccgacagatcattgctgtggtcctgggtgtcattttggggagttttgccattacgagggttcttgggaatagcaggattctgcctgatcaatgcaagagtccttgtacctntacttcagcaattactacagattgatgaaggaagaatatggtnggancttggaaactcacaaaggaanggtttatgacctctttgc

SEQ ID NO: 424 - DNA, 3118 bp, Homo sapiens
  misc feature (388): n equals a,t,g, or c
  misc feature (485): n equals a,t,g, or c
ggcggcagctgtggaagctcaggcgctgcgcgtgagaggtcccagatacgtctgcggttccggctccgccaccctcagcttctcttccccaggtctgggagccgagtgcggaaggagggaacggccctagctttgggaagccagaggacacccctggctcctgccgacaccgccctccttcccttcccagccgcgggcctcgctcggtgctaggctactctgccgggaggcggcggcggctgccagtctgtggagagtcctgctgccctccagccgggctcctccaccgggccttgcaggggccgagagagctcggtgcccgcccttccgctcgcctttttcgtcagctggctggagcagcatcggtccgggaggtctctaggctgangcggcggccgytcctctagttccacaatgtccacgggcggagacttcgggaatccgctgaggaaattcaagctggtgttcctgggggagcaaagckntggaaagacatctttgatcaccagattcatgtatgacagttttgacaacacctatcaggcaacaattggcattgactttttatcaaaaactatgtacttggaggatcgaacagtacgattgcaattatgggacacagcaggtcaagagcggttcaggagcttgattcctagctacattcgtgactccactgtggcagttgttgtttatgatatcacaaatgttaactcattccagcaaactacaaagtggattgatgatgtcagaacagaaagaggaagtgatgttatcatcatgctagtaggaaataaaacagatcttgctgacaagaggcaagtgtcaattgaggagggagagaggaaagccaaagagctgaatgttatgtttattgaaactagtgcaaaagctggatacaatgtaaagcagctctttcgacgtgtagcagcagctttgccgggaatggaaagcacacaggacagaagcagagaagatatgattgacataaaactggaaaagcctcaggagcaaccagtcagtgaaggaggctgttcctgctaatctcccatgtcatcttcaaccttcttcagaagctcactgctttggcccccttactctttcattgactgcagtgtgaatattggcttgaaccttttcccttcagtaataacgtattgcaattcatcattgctgcctgtctcgtggagatgatctattagcttcacaagcacaacaaaagtcagtgtcttcattatttatattttacaaaaagccaaaatatttcagcatattccagtgataactttaaaaattagatacattttcttaacatttttttcttttttaatgttatgataatgtacttcaaaatgatggaaatctcaacagtatgagtatggcttggttaacgagcggtatgttcacagcctactttatctctccttgcttttctcacctctcacttacccccattccctattaccctattcttacctagcctcccccgacttcctcaaaacaaacaagagatggcaaagcagcagttctaccaagcccattggaattatcctttaattttacagataccacttgctgtaggctacggaccaagatgtccaaaattattcttgagcactgataaaaattacggtcttctttgaggtcaaaattcagccatcatggtaggcagtgcttgaatgagaaaaggctcctggtgcatcttcaaaatgagtcctaaagaacatactgagtacttagaagtagaagaacataagatgtatttctgactaaaacaaatggctctttcacatgtgctttattagactctgggagagaaaattaaccaagtgcttcagaacaggtttttagtatttaattcttcacggtaagaaaatgaagttctaatgaactgtttctcccaaggttttaaaattgtcaagagttattctgtttgtttaaaaaataagaaacctctttaagcaatagattttgcttgggttttcttttttaaaaacataatactgtgcaggcaaggcactgtaaaagttttaattccttccagaagaaccagtggaagaatttaaatttggcgctacgatcaaaactactgaattagtagaaataatgatgtctaaagcttaccaacaaaagaaccctcagcagaataacaaaaactttgctcaggacatttgaggtcaaattgaagacggaaaccggaaaccgttttcttgtaagcccctagaggcagatcaggtaaagcatacatagtagagggaaaggagagaatggaaataaaactcaatattatgcagatttatgccttattttttagcattttttaaggttgggtctttcaggctggttttggtttgtattagatctgtatagtttaattaactggtgatttagttttatatttaagctacaattaatcttttttctttggtgatatttatttctttgccttttttttttttaacaactttcaatcttcagatgtttcgttgaatctatttagagcttcaccatggcaatatgtatttcccttaaaacactgcaaacaaatatactaggagtgtgcccttttaatctttactagttattgtgagattgctgtgtaagctaataaacacatttgtaaatacattgtttgcaggacgaaaacttctgagttacagctcaggaaaagcctgctgaatttatgttgtaagcattacttaacacagtataaagatgaaaagacaacaaaaatatcttcatacttcctcatcccctcattggaacaaaaccttaaactgggagaaccttagtcccctctctttcctcttcctcctccacttcccacttattgtcaccttgtaatattcagagagcacttggattatggatctgaatagagaaatgcttacagataatcattagcccacataccagtaacttaaagatgggatggagttgtaaagtgcttttataatacaatataattgttaaaggcaagggttgactctttgttttattttgacatggcatgtcctgaaataaatattgattcaatatggcaaaaaaaaaaaaaaaaaaaaaaaaaaaaaaaaaaaaaaaaaaaaaaaaaaaaaaaagggcggccgctcgcgatcttagc

SEQ ID NO: 425 - DNA, 1410 bp, Homo sapiens
ccacaaggggctctaaaaagcaaacattcaagagtatgtagtttttagacattaagttaattattttaaacagtgacagcaaaacacaagtgattaaatatagtttatttgttccaatgactaaattttacctcatttattaatctggtcattaaggaatatatttaataatattatgtaattattctttttatgcatgatacacctagaaaaatgccttttgtttctattgatggctttgttgtttggagctacttttgattacttattgcagtttcccaatttagtctttactttatctaactcacaaagtaaaattaactgatcacatggcaactactgtatttaaatagttctggaaaaatgaaagtgctttttgctgcttggtaaatgggtaatgcccttgattccttgactgtaggacatagctgatctaaagtactctgtcagttttaccttcacccatgactgtcattagttgtcaaagttgaaaagtactttagctgtgagaaatccttgtatgtttttattataagaggtataatcatcctcaaagcctgtttttattacatgatgtggactgattattttttctatcacagtgttaacagatggattttattgtaaatacaaagaaaacatattgattattgtagtattcttatgtcacctggccttttgcgtgagattatttattatttctagcaaggctttcttcctttcttattgcccagagactgactgatacatcttttgttatttttacacataaattaaacatagcctttttggacaaattcactaaatattaatgtataaaatgtaattgagtaaatttttatcagaattttaaaaataaaagagcttagactcagtagaactcagtagaagcttcactatttactccagcgtgtgtaaattgtacttactctattctcagagtatatttactgtccttaccattgattctttccctttgctaatttttttttttgttaatggtagctgcgactttaggtggggtatattttcttctcctaagagaatagacagtttttccagattcatcatcattgactgtcaagaaaggacccttcagcaaggctgtaccctcaatgcagttgatggcctgtcttcacggatttacagacttggcctgatgcccatgtaaattcaagctttggcttgtggtaacaaccacaagaagacaagcatctgtggtgcggaggcaagcaggctaactaggagttgacaagctaagaaagtgaaactgttctttcttagttaactgtctttctctggagctctgttattttgagtataatatttccacgacacttagtaaatgcaagctaaaatgtaataataataaattgtattggagaaacctaaaaaaaaatttttttaaaa

SEQ ID NO: 426 - DNA, 1422 bp, Homo sapiens
  misc feature (328): n equals a,t,g, or c
  misc feature (479): n equals a,t,g, or c
ctcaccttggccttggaattaatgacttggagaagacctgaatggggaggggagagcagtagaagcatgagcctttctgactgtctacatgttcttgcccagttttaacttctagtcatggcgaatgatcgcaggagagcacagactggaccctgctacgatctctcttggagtggatcagactgatgatcaccaacaaccaactcattcccggataaggaagaagagagtgtcacctacttcagtgtggtttcaaccctacttctgcatcttaaagacactgtatggtttcagcagtagtgcccctgttcattagtccccctgatgntttcattcctcatctcatctttttcttagcagcattcaatgaatccttcattctagaaacactctatatctttggttttcatgrgaccattctcaccttgttttgtcctgtgacttttttgaaaaaaacaaaaacaaaaaacccttttttnctttttaaattctggtaaaaaacacaatgaaaatttgctatcttaaccatgttgaaatgtgcagttagtaaagtacattcacattgtggtgcaagccatcactaccatccatcactagaacccttttcatcttgcagatctgaaactctacccattaaacracttcccatcttcccatccccacagctcctagcaaccaacattctactttctctatcagtttgactactctaggtacctcatatgagtagaatcatacagcatttatccttctctgcctggcttatttcacttgtataatgtccycaaggttcattcatgttgtagcatgcatcagaacttcctccccttttaaaggctggataatatttcatggtatgtttagatcacattctgtttatccattcatccatcagtgaacacttgtgctccttccaactttgggctgttgggtgtcctgccactgttgctcctagtgctcaatctcgtttattccctcctaatcaagtgtacaacgttggacactgtgcaggatgatgccacttcatcttggatgctaatctgccatgttgacttctgattaaccccaggcccaggaatgcctcaagatttctactttacttactgttgcttgtgtaagccaagacaaccttgatgttatcataaacatgtacttacctaagtcctgtcctttggcaaattatgggctatgagacacagcattcttgcctttccctgaggggtcaatttcagcgatcctacacattccttctgaagcacttatgctctttctatatggtatgtaagctctcggtctggggagtaacagtgcagagatctacctgtcttgttgccacatgtttctaaactttccaataaatcaccttctactgacaaaaaaaaaaaaaaaaaaactcgaggtcgacggtatcgataagcttga

SEQ ID NO: 427 - DNA, 830 bp, Homo sapiens
  misc feature (686): n equals a,t,g, or c
  misc feature (772): n equals a,t,g, or c
  misc feature (809): n equals a,t,g, or c
gggatcgacccacgcgtccgcctagcgccgctgggcctgcaggtctctgtcgagcagcggacgccggtctctgttccgcagatggggtttgttaaagttgttaagaataaggcctactttaagagataccaagtgaaatttagaagacgacgagagggtaaaactgattattatgctcggaaacgcttggtgatacaagataaaaataaatacaacacacccaaatacaggatgatagttcgtgtgacaaacagagatatcatttgtcagattgcttatgcccgtatagagggggatatgatagtctgcgcagcgtatgcacacgaactgccaaaatatggtgtgaaggttggcctgacaaattatgctgcagcatattgtactggcctgctgctggcccgcaggcttctcaataggtttggcatggacaagatctatgaaggccaagtggaggtgactggtgatgaatacaatgtggaaagcattgatggtcagccaggtgccttcacctgctatttggatgcaggccttgccagaactaccactggcaataaagtttttggtgccctgaarggagctgtggatggaggcttgkctatccctyacagtaccaaacgattccctggktatgawtctgaaagcaaggaatttaatgcagaagtacatcggaagcacatyatgggccnagaatggttgcagattacatgcgctacttaatgggaagaagatgaagatgcttaccaggaacaggttctyttcaatwccttaaagnacagcgtaacttccagaccatgatgggaggagatgtnttaagaaaagcttaatgctgg

SEQ ID NO: 428 - DNA, 1622 bp, Homo sapiens
  misc feature (76): n equals a,t,g, or c
ggcagagcttccagggctgsccatayttgccatggccgactcagtagtcactaacttcaacaaaaataaaactgtngcaatagtattctattaaagcttctttaactgcttaaacttgcggttttgacatggtacctatcctttcttcccttttcaaaagattcgctatagagtctttctctacatgccagtctccaaaatggcgcggacggcatcagaaggtcagaggtgagtcacgtgggtccccccggttccggcgcggttgaggccttcggtggtgaacgagtctccagcaccatgtctggtttgtctggcccaccagcccggcgcggcccttttccgttagcgttgctgcttttgttcctgctcggccccagattggtccttgccatctccttccatctgcccattaactctcgcaagtgcctccgtgaggagattcacaaggacctgctagtgactggcgcgtacgagatctccgaccagtctgggggcgctggcggcctgcgcagcacctcaagatcacagattctgctggccatattctctactccaaagaggatgcaaccaaggggaaatttgcctttaccactgaagattatgacatgtttgaagtgtgttttgagagcaagggaacagggcggatacctgaccaactcgtgatcctagacatgaagcatggagtggaggcgaaaaattacgaagagattgcaaaagttgagaagctcaaaccattagaggtagagctgcgacgcctagaagacctttcagaatctattgttaatgattttgcctacatgaagaagagagaagaggagatgcgtgataccaacgagtcaacaaacactcgggtcctatacttcagcatcttttcaatgktctgkctcattggactagctacctggcaggtcttctacctgcgacgcttcttcaaggccaagaaattgattgagtaatgaatgaggcatattctcctcccaccttgtacctcagccagcagaacatcgctggcacgtgcctgccctaaggcatcctaccaacagcaccatcaaggcacgttggagctttcttgccagaactgatctcttttggtgtgggaggacatggggtaccacctacacccaacaagtcaatgagggacttctttttaatttggtaggattttgactggttttgcaacaataggtctattattagaggcacctatgacaaaaaataggggttacctagataatgccaaagtcagcatttgtcctgggttcccttgtgtgatctgtttggactatgttttcttttcttctcccacttgctcagcagcttgggcttccattctagttcttttaccaagatttttgtgtgaccatgttgacttcatttggattgccctctttcaatttccttgtgaaaacacccttaactttctctttacccttagctgaaatgtttacatagcttctggtgatatcttttcatgattttaaatctcttaaaatggtgatggatgtgacacctcataaaagtgagctttggactgtagataactcttaaagaaaatgtcattttagacaattaaaatatttgtgctcaactgcttggaaaaaaaaaaaaaaaaaaaaaaaaaa

SEQ ID NO: 429 - DNA, 548 bp, Homo sapiens
  misc feature (48): n equals a,t,g, or c
  misc feature (385): n equals a,t,g, or c
  misc feature (453): n equals a,t,g, or c
  misc feature (512): n equals a,t,g, or c
ctatgctacttagatatttgtggcaaagcagaaagctttttgactgtnaaggcagaggtcagcactgggggaaacttgctggtggtctctcccacaaccttgcccagagtcctttccactaaggaggtgaagagaacagagaaagagatttccatttctgctgccagagctggtatttgcctgcctgattctctgtgtttcctgtttcaccgccaccctttcaggagagaactacaccagttcatcatgagggtcagggaagcaaaagctctcagatgtgtccagggcgttacttaagaaatgagtatgcagattctggaaggggtgtggaaaaggtgatcctttacccccacccaggaaaacctgcattgtgctagcatggaanaatcatgggctttggaattaaacccatttggtggaattaaacccatttggtttcaaatcccagttatnacatctgttaactttgcaaactcacaaaaattatttgaaattatctgagttttcatttnctcaccttccagaatggggataatgcctcctgcatc

SEQ ID NO: 430 - DNA, 569 bp, Homo sapiens
  misc feature (381): n equals a,t,g, or c
  misc feature (553): n equals a,t,g, or c
cccccgccctcggccgcttctgtgggagcaagaagcccgagcccgtcctggccacaggcagccgcatgttcctgcgcttctactcagataactcggtccagcgaaagggcttccaggcctcccacgccacagagtgcgggggccaggtacgggcagacgtgaagaccaaggacctttactcccacgcccagtttggcgacaacaactaccctgggggtgtggactgtgagtgggtcattgtggctgaggaaggctacggcgtggagctcgtgttccagacctttgaggtggaggaggagaccgactgcggctatgactacatggagctcttcgacggctacgacagcacagcccccaggctggggcgctactgtggctcanggcctcctgaggaggtgtactcggcgggagattctgctgtragtcactcgatacaccataccaaaaaaggtttccacctgcgatacaccagcaccaagttccaggacacacttcacagcaggaaatgaccactggcttracaagggccgggactggamcctgktgcccttgncgcctaaactggataa

SEQ ID NO: 431 - DNA, 549 bp, Homo sapiens
  misc feature (519): n equals a,t,g, or c
  misc feature (541): n equals a,t,g, or c
gccggaacttttgtcgataggaacgggtttgcacagttgagtgttgtcggccggcgtgaaggagactagggggccatcctcttcctttcgccgtcgccgccgcggagcggagtcgagccgagctgatttgatcgaggagcgcggttaccggacgggctgggtctatggtcgctccgcgggccgctccgccggctggtgcttttttatcagggcaagctgtgttccatggcagggaacttttggcagagctcccactatttgcaatggattttggataaacaagatctgttgaaggagcgccaaaaggatttaaagtttctctcagaggaagaatattggaagttacaaatattttttacaaatgttatccaagcattaggtgaacatcttaaattaagacaacaagttattgccactgctacggtatatttcaagagattctatgccaggtattctctgaaaagtatagatcctgtattaatggctcctacatgtgtgtttttggcatccaaagtaganggaaaaaaaatttttttttttngggggggg

SEQ ID NO: 432 - DNA, 1221 bp, Homo sapiens
  misc feature (1160): n equals a,t,g, or c
  misc feature (1183): n equals a,t,g, or c
cgcacttcccctctgctgggcgcgcggtggacggtctgaaagggagtgttcgggtttcgctggggcctcgcggctccagagcccagcatggcttcctcgcgagcctcttccacggcaaccaaaactaaagcacccgacgacttagttgctccggtcgtgaagaaaccacacatctattatggaagtttggaagagaaggagagggagcgtctggccaaaggagagtctgggattttggggaaagacggacttaaagcagggatcgaagctggaaatattaatataacctctggagaagtgtttgaaattgaagagcatatcagcgagcgacaggcagaagtattggctgagtttgagagaaggaagcgagcccggcagatcaatgtttccacagatgactcagaggtcaaagcttgccttagagccttgggggaacccatcacactttttggagagggtcctgctgaaagaagagaaaggttaagaaatatcctctcagttgtcggtactgatgccttgaaaaagaccaaaaaggatgatgagaagtctaaaaagtccaaagaagagtatcagcaaacctggtatcatgaaggaccaaatagcttgaaggtggcaagactatggattgctaattattcgttgcccagggcaatgaaacgcttggaagaggcccgactccataaggagattcctgagacaacaaggacctcccagatgcaagagctgcacaagtctctccggtctttgaataatttttgcagtcagattggggatgatcggcctatctcctactgtcactttagtcccaattccaagatgctggccacagcttgttggagtgggctttgcaagctctggtctgttcctgattgcaacctccttcacactcttcgagggcataacacaaatgtaggagcaattgtattccatcccaaatccactgtctccttggacccaaaagatgtcaacctggcctcttgtgcggctgatggctctgtgaagctttggagtctcgacaggtgaatatcactgttctgtggcccatactgccatcactaaagtagatgtttgattggttggtccccaggacctcagtaaaaatctggcattagggccatgcgcatgggctcacaccttaagggctgaaggcaggagaattngcttaaacccggggaaatgggangttgtggtgagccgagattgcacactgcactcccagct

SEQ ID NO: 433 - DNA, 1115 bp, Homo sapiens
  misc feature (45): n equals a,t,g, or c
ggcacacatcaccaagcccagccaaattttgttttttttttgtanagatggggtttcatcacgttkcccaggctgatctcgaacctctgggctcaagcaattcactcgcctcggcctcccaaaatgctgggattacaggcctgagccactgcgcccagccaggatttgaattattttaactcatccatgggctgccctagaatgtcacaaatgagggttgtttaatgcctttcttatagctgctactggaacactattatgacctaatttatgagccatccttactcatctacaagtgctgaagcaatgttacatacttttttgctaaactcagattttttagcctaatttcttgtcctcctatccacctgcatccacacatggcctgcatggggctgccttccctgcagtgttctgcagccatgcttcagggtatagctgttggtggacagcctcaggtcttgggggcactatagccactaaacgaggtgtgaaaggctcaagaggatgaccagcaattaattatccccagaaagtgaaggaaaagagacctttagggatgttgctggtcaagtcttgatttgaccggagtcaaatcaatcttcaagcaatcttggaatcctcaactgcagtaagcatttcaaaatgcaaacaaactgcttaacaactgacaagacaccagcccatacgctgctcttccaacagtgggttctagctttgaacaaaagtgctaaacatttccttgaatatattcttcctctttttgtcctcatcactcaatactggtgctcttgtcacaggtagaacagcttgtttcttttccatctattcaagtgtgtttctaattctaaaatgctgatcttctctggagtctatggtaggcaattatggtcactggaatagtttgtcttgttttmaaatattattggtgcatgtacaacagcatccaacatatctgtcttgttcctagatatatagctctgattttaggccttttgtgcataccattacaatatggtggggtaagacattctacagtagcctgtgctgaactgatctcttaaataaacttgcttctggttaactaaaaaaaaaaaaaaagggcggycgctcta

SEQ ID NO: 434 - DNA, 1604 bp, Homo sapiens
ctgctgctactctgtttctttcctcactttgctttccaaggtggtatgtgatccccagctcaggcctgtgcagacaggaaattctcccctgcagcaagtaggggaagtgggttgtgggatgtgacctccttccagatatcaggcagtgagtgtaaacctgccacctccagccctgatccattctcacctagcggctacaggaagctgtgtctgttcgatttggtgggaggagatgtgcagggagctgtatcttgtcctccgcttgtgaaaaactcaaggatgtggagaagagtagaccgtggaaccctgctcttctgcagccaagctgaggggcaggatgcgtgtgggacagtggtagagaagcaggggatagactcataggctgcaacaaaggtgactctgtccctggacactgcctccgtactttctccttgcttcactggccacagcatctccctccagccctcgctatgtgcctctgccatcttcacccatcatggagcagaggtgaggagaggcagcctgggaatatggagaccagtgaaggaccaggcctggagagcacagggtcctacctgggcatccagcagaggagcccctaaaggccaggagcaccccaagaggagggagggcagccagcctccattgacggcgagcctccagccctctcctactttgatcaccatttctctccaggctttctgcctccgagatgtggcaccatagtgcggtgccctgtggcttcaccgccctacttccacctccgcccagcctgtaatgtttatataagcagcctcaaggaccaagaaccatctgcgaaaggacacacacaggaaattcataaaagaaatctgaatggataaaaccatgaaaaaaagtatgcttcattagtaattaaagaaaggcaaatagagctggaagcatttttcccttagcaaaccataacagaaaaaaataagacccaatattggcaaagagactactgaaaaaacattcccatacattgcgtgtgggagtatacatcggtgcaggcttcctggatgacagttgggtgatatgtgtcatgtggcctaaaagcctccatgtcatttgacctacgaattctatctttgggaatttatcctaagaaaatacttaaggatttagttagtgataagatgttcatcccagcattgcaatggagaaaaatgggaagcaatggtttggttgggaatttattccttttctgctgtaacgaaagtttgcaataggggattgcttaagtaaattattgtatctccatccagatggtggagtaccgcgcagacattaaaagtcatgtaaaagaacatctgactgaaagaaaaatgctccttgaatattaaaaggttgtaaaaatagtgcatgttatgtgatttcaattttgttttttaaaatatgggtgtatgcttgtatacgtagagcagataaaaaagacggaaggcatactaaaaaatgttgagtggttatctttgtatggtggaacaaagtcactgtaattttcatctttggtttttctgtaatttccaaattttccacattttgtatttcatataataaatataatttaagaaaaaaaaaaaaaa

SEQ ID NO: 435 - DNA, 301 bp, Homo sapiens
  misc feature (274): n equals a,t,g, or c
  misc feature (277): n equals a,t,g, or c
gaggcggtgaacgagcagctttctagcgagcgcagcaacctggcccaggtgatccgccaggagttcgaggaccggctggcagcctctgaggaggagacgcggcaggccaaggccgagctggccacgctgcaggcccgccagcagctggagctggaggaggtgcaccggagggtgaagacagccctcgcgaggaaggaggaggccgtgagcagcctccggacacaacatgaggtgagtccctgtggccagccctgctggacctcggggctgggancangcctgaccctgtgggtgtgctgca

SEQ ID NO: 436 - DNA, 318 bp, Homo sapiens
  misc feature (242): n equals a,t,g, or c
aattcggcacgaggaaacccttagtcctggccatttcaaaagcatcacacagaagaagaccttgatatttacatttaagtcacatatgcagctactgacacttactagtgctgttatagtcctggctattattccatgaggtcgtcacattttaaccttttgcataagcctccaacggcctgatggaatgatgaagcctcagaacagtttctacacaatggctaagggatgtacccattttnaattttcctcttttctgtgatcacagagggtgaatacgctttggccggatacacagaagtgaaaactgtcacccat

SEQ ID NO: 437 - DNA, 1882 bp, Homo sapiens
  misc feature (1793): n equals a,t,g, or c
  misc feature (1795): n equals a,t,g, or c
  misc feature (1818): n equals a,t,g, or c
  misc feature (1826): n equals a,t,g, or c
  misc feature (1844): n equals a,t,g, or c
  misc feature (1855): n equals a,t,g, or c
tagcccgtcgggagcgccaggccggccaggcctgcgccgycgccgccgccgccgtcgccgccgcgccgaccatgtcgmagccaaggagaacccgtgcaggaaattccaggccaacatcttcaacaagagcaagtgtcagaactgcttcaagccccgcgagtcgcatctgctcaacgacgaggacctgacgcaggcaaaacccatttatggcggttggctgctcctggctccagatgggaccgactttgacaacccagtgcaccggtctcggaaatggcagcgacggttcttcatcctttacgagcacggsctcttgcgctacgccctggatgagatgcccacgacccttcctcagggcaccatcaacatgaaccagtgcacagatgtggtggatggggagggccgcacgggccagaagttctccctgtgtattctgacgcctgagaaggagcatttcatccgggcggagaccaaggagatcgtcartgggtggctggagatgctcatggtctatccccggaccaacaagcagaatcagaagaagaaacggaaagtggagccccccacaccacaggagcctgggcctgccaagtggctgttaccagcagcagcagcagcagcagcagcagcagcagcatccccagtgctgagaaagtccccaccaccaagtccacactctggcaggaagaaatgaggaccaaggaccagccagatggcagcagctgagtccagctcagagtcccagccagagccagcctcctgctgccagcytctgcgggaactgggctagagagcaaagaagaggagagcgccatgagtagcgaccgcatggactgtggccgcaaagtccgggtggagagcggctacttctctctggagaagaccaaacaggacttgaaggctgaagaacagcagctgcccccgccgctctcccctcccagccccagcacccccaaccacaggaggtcccaggtgattgaaaagtttgaggccttggacattgagaaggcagagcacatggagaccaatgcagtggggccctcaccatccagcgacacacgccagggccgcagcgagaagagggcgttccctaggaagcgggacttcaccaatgaagcccccccagctcctctcccagacgcctcggcttcccccctgtctccacaccgaagagccaagtcactggacaggaggtccacggagccctccgtgacgcccgacctgctgaatttcaagaaaggctggctgactaagcagtatgaggacggccagtggaagaaacactggtttgtcctcgccgatcaaagcctgagatactacagggattcagtggctgaggaggcagccgacttggatggagaaattgacttgtccgcatgttacgatgtcacagagtatccagttcagagaaactatggcttccagatacatacaaaggagggcgagtttaccctgtcggccatgacatctgggattcggcggaactggatccagaccatcatgaagcacgtgcacccgaccactgccccggatgtgaccagctcgttgccagaggaaaaaaacaagagcagctgctctttttgagacctgcccgaggcctactgagaagcaagaggcagagctgggggagccggaccctgagcagaagaggagccgcgcacgggagcggaggcagagggccgctccaagacctttgactgggctgagttccgtcccatccagcaggccctggctcaggagcgggtgggcggcgtggggcctgctgacacccacgagcccctgcgccctgaggngnasctggggaagctggagcgggancgtgcacngaagcgggaggagcgccncaagcgcttcnggatgctcgacgccacagaacgggcca

SEQ ID NO: 438 - DNA, 2056 bp, Homo sapiens
  misc feature (2046): n equals a,t,g, or c
  misc feature (2053): n equals a,t,g, or c
  misc feature (2054): n equals a,t,g, or c
gattcagcttaacccgtgatcttcttaagttaaaggtacttttgttttataaaagctctagataaaactttcttttctgatcatgaatcaagtatctgtggtttcatgcccctctctatacctttcaaagaactcctgaagcaacttaactcatcatttcagcctctgagtagaggtaaaacctatgtgtacttctgtttatgatccatattgatatttatgacatgaacacagaatagtaccttacatttgctaaacagacagttaatatcaaatcctttcaatattctgggaacccagggaagtttttaaaaatgtcattactttcaaaggaacagaagtagttaaccaaactaacaagcaaaacctgaggtttacctagtgacaccaaattatcggtattttaactgaatttacccattgactaagaatgaaccagatttggtggtggttttgtttctatgcaaactggacacaaattacaacagtaaatttttttataagtgcttctcccttctccatgatgtgacttccggagataaaggattcaaaagataaagacaaagtacgctcagagttgttaaccagaaagtcctggctgtggttgcagaaacactgttggaagaaaagagatgactaagtcaagtgtctgccttatcaaaagagcaaaaatgcctctggttttgtgtttgggagaaaaatatcttggacgcactgttttccttgataaaagtcatcttctctactgtgtgaaatgaatacttggaattctaattgttttgtgtgccaggggcagtaatgtccctgcctcttctcccaatcaaggttgaggagtggggctggggagaggacttaactgacttaagaagtagggaaaacaaaaacctctctcctcagccttccacctccaagagaggaggaaaaacagttgtctgctgtctgtaattcagtttgcgtgtattttatgctcatgcaccaacccatacagagtaaatcttttatcaactatatactggtgtttaatagagaatgattgtcttccgagttttttggttccttttttaactgtgttaaagtacttgaaatgtattgactgctgactatattttaaaaacaaaatgaaataatttgagttgtattacagaggttgacattgttcagggatgggacaaagccttcttcaatccttttcatactacttaatgattttggtgcaggaacctgagattttctgatttatatttcatgatatttcacatttgctcttcacagcatgagcatgaagcccagtggcaccaaatggctgggtacaatcaagtgatattttgtagcacctcactatctgaaaggccatgagttttcagatgatttcattgagcttcattgcagcctgaaattttaaaaaagttgtgtaatacgccaaccagtcaagttgtgttttggccagagatttagatatgtccaatttcctggctcatttcattgtgctctatgggtacgtataaaaagcaagaattctgtttcctaggcaaacattgcaactcagggctaaagtcatccagtgaaacttttagagccagaagtaactttgtcccagtcctacaatgtgaaaagagtgaatagttgcctctttttagccattttcatggctggtacatattcgtacgcattacttttcagaatcaatacgcactttcagatattcttatttttattctcttaagtctttattaactttggagagagaaatgatgcatctttttattttaaatgaagtagatcaacatggtggaacaaaatgataaagaacagaaaacatttcaatatattactaataactttttccaatataaatcctaaaattcctataacatagtattttacagttttatgaagctttctattgtgacttttatggaattaagagatgaagaagatgagatattttagcatttatatttttcaaaattatatgtatacttaaaaataaagtaactttatgcatttaaaaaaaaaaaaaagggsggcccgttttagaggatccangtttacnncc

SEQ ID NO: 439 - DNA, 721 bp, Homo sapiens
  misc feature (688): n equals a,t,g, or c
ggcggcgcggrcaggtcggagctcggagctgctgcttctggttctcttgtggccgccgtcgctgtccggctgccttgggctgccgaacagacaaggcgtgggccacagcacctcagaagccgacgcagctcgacgcaggggccggcaggagggtgggcgatcgcgtgtcggagggcgccgcgcgggcaggcgggcgggcgccagagggggaaagaggcgggggcggcgggtcagccgctggccgggccggccggggaatgtcgatgcctgacgcgatgccgctgcccggggtcggggaggagctgaagcaggccaaggagatcgaggacgccgagaagtactccttcatggccaccgtcaccaaggcgcccaagaagcaaatccagtttgctgatgacatgcaggagttcaccaaattccccaccaaaactggccgaagatctttgtctcgctcgatctcacagtcctccactgacagctacagttcagctgcatcctacacagatagctctgatgatgaggtttctccccgagagaagcagcaaaccaactccaagggcagcagcaatttctgtgtgaagaacatcaagcaggcagaatttggacgccgggagattgagattgcagagcaagacatgtctgctctgatttcactcaggaaacgtgctcagggggaraagcccttggntggtgstaaaatakkgggyttgacacattacag

SEQ ID NO: 440 - DNA, 1041 bp, Homo sapiens
  misc feature (1025): n equals a,t,g, or c
  misc feature (1030): n equals a,t,g, or c
  misc feature (1039): n equals a,t,g, or c
ctcgtgcgcggacattgtcagctgcgtttccgcggtcgcggttgaggagctcaagcttgggaaaatggtgtgcattccttgtatcgtcattccagttctgctctggatctacaaaaaattcctggagccatatatataccctctggtttcccccttcgttagtcgtatatggcctaagaaagcaatacaagaatccaatgatacaaacaaaggcaaagtaaactttaagggtgcagacatgaatggattaccaacaaaaggaccaacagaaatctgtgataaaaagaaagactaaagaaattttcctaaaggaccccatcatttaaaaaatggacctgataatatgaagcatcttccttgtaattgtctctgacctttttatctgagaccggaattcaggataggagtctagatatttacctgatactaatcaggaaatatatgatatccgtatttaaaatgtagttagttatatttaatgacctcattcctaagttcctttttcgttaatgtagctttcatttctgttattgctgtttgaataatatgattaaatagaaggtttgtgccagtagacattatgttactaaatcagcactttaaaatctttggttctctaattcatatgaatttgctgtttgctctaatttctttgggctcttctaatttgagtggagtacaattttgttgtgaaacagtccagtgaaactgtgcagggaaatgaaggtagaattttgggaggtaataatgatgtgaaacataaagatttaataattactgtccaacacagtggagcagcttgtccacaaatatagtaattactatttattgctctaaggaagattaaaaaaagatagggaaaagggggaaacttctttgaaaaatgaaacatctgttacattaatgtctaattataaaattttaatccttactgcatttcttctgttcctacaaatgtattaaacattcagtttaactggtaaaaaaaaaaaaaaaaaaaaaaaaaaaaaaaaaaaaaaaaaaanccccnggggggggncc

SEQ ID NO: 441 - DNA, 1995 bp, Homo sapiens
  misc feature (1957): n equals a,t,g, or c
  misc feature (1992): n equals a,t,g, or c
  misc feature (1995): n equals a,t,g, or c
gcccacgcgtccgcccacgcgtccgcagcatcaccatgtctgttcgatacagctcaagcaagcactactcttcctcccgcagtggaggaggaggaggaggaggaggatgtggaggaggaggaggagtgtcatccctaagaatttctagcagcaaaggctcccttggtggaggatttagctcaggggggttcagtggtggctcttttagccgtgggagctctggtgggggctgctttgggggctcatcaggtggctatggaggattaggaggttttggtggaggtagctttcgtggaagctatggaagtagcagctttggtgggagttatggaggcagctttggagggggcagtttcggaggtggcagctttggtgggggcagctttggtggaggcggctttggtggaggcggctttggaggaggctttggtggtggatttggaggagatggtggccttctctctggaaatgaaaaagtaaccatgcagaatctgaatgaccgcctggcttcctacttggacaaagttcgggctctggaagaatcaaactatgagctggaaggcaaaatcaaggagtggtatgaaaagcatggcaactcacatcagggggagcctcgtgactacagcaaatactacaaaaccatcgatgaccttaaaaatcagattctcaacctaacaactgataatgccaacatcctgcttcagatcgacaatgccaggctggcagctgatgacttcaggctgaagtatgagaatgaggtagctctgcgccagagcgtggaggctgacatcaacggcctgcgtagggtgctggatgagctgaccctgaccaaggctgacctggagatgcaaattgagagcctgactgaagagctggcctatctgaagaagaaccacgaggaggaaatgaaagaccttcgaaatgtgtccactggtgatgtgaatgtggaaatgaatgctgccccgggtgttgatctgactcaacttctgaataacatgagaagccaatatgaacaacttgctgaacaaaaccgcaaagatgctgaagcctggttcaatgaaaagagcaaggaactgactacagaaattgataataacattgaacagatatccagctataaatctgagattactgaattgagacgtaatgtacaagctctggagatagaactacagtcccaactggccttgaaacaatccctggaagcctccttggcagaaacagaaggtcgctactgtgtgcagctctcacagattcaggcccagatatccgctctggaagaacagttgcaacagattcgagctgaaaccgagtgccagaatactgaataccaacaactcctggatattaagatccgactggagaatgaaattcaaacctaccgcagcctgctagaaggagagggaagttccggaggcggcggacgcggcggcggaagtttcggcggcggctacggcggcggaagctccggcggcggaagctccggcggcggccacggcggcagttccggcggcggctackgaggcggaagctccggcggcggaagctccggcggcggctacgggggcggarctccagcggcggccacggcggcagttccagcggcggctacggtggtggcagttccggcggcggcggcggcggctacgggggcggcactccggcggcggcacagctccggcggcgkatacggcggcggcacagctccggcggcggatacggcggcggcacagctccggcggcggatacggcggcggcactccagcggaggccacaagtcctcctcttccgggtccgtgggcgagtcttcatctaagggaccaaggtcagcagaaactagctggggtaatcagaattagttttaacttcctgtgatggtttttttgcgctttaactctagagttgttttaaaaaattaaaaatcttagagcggttccgttgcattgttcacaactantcttaacaccagccgtgaaaatggctgatcaaatncan

SEQ ID NO: 442 - DNA, 1723 bp, Homo sapiens
agcagcacttccggtacgaaaaactcgctgctgccccaacctggcttgacaggcttggtctctgcaagtggctctcagccccttcttctttcctgcctcaccttccaattcgtttgccgccgccgtcccgcagctgctgtttccggagttgccccttccccatgttccggggcaggagtccgcaaagcgaagatccgcccgccggttcctcatcatgtccgaactgactaaagagctgatggagctggtgtggggcaccaagagcagccccggtctctcggacaccattttctgccgctggacgcaagggtttgtgtttagtgaatcagagggatctgcattagaacagtttgaaggtggcccctgtgctgttattgcacctgttcaggcatttcttttgaagaagctcctgttttcttcggagaagtcttcttggcgggattgttcagaggaagagcagaaggaactcctttgtcataccttgtgtgatattttagaaagtgcttgttgtgaccactctggatcatactgcttggtttcatggttaagaggaaagacaactgaggaaactgctagtatttctgggagtcctgcagagtctagttgccaagtggaacattcttctgccttggctgtcgaagagcttggctttgagcgatttcatgcattaattcaaaaaagatcgttcagaagtttaccagaattaaaagatgctgtcttggaccagtattcaatgtggggaaataaatttggagtattgctttttctgtattctgtattactgacaaagggcattgaaaacataaaaaacgaaattgaagatgcaagtgaacccttgatagatcctgtatatggacatggcagccaaagtttaattaatctcctgctgacgggacatgctgtttctaatgtatgggatggtgatagagagtgctcaggaatgaaacttcttggtatacatgaacaagcagcagtaggatttttaacactaatggaagctttaagatactgtaaggttggttcttacttgaaatctccaaaattccctatttggattgttggcagtgagactcacctcaccgtattttttgccaaggatatggctttagttgcccctgaagctccttcagaacaagccagaagagtttttcaaacctacgacccagaagataatggattcatacccgattcacttctggaagatgtgatgaaagcattggaccttgtttcagatcctgaatatataaatctcatgaagaataaattagatccagaaggattaggaatcatattattgggcccatttcttcaagaattttttcctgatcagggctccagtggtccagaatcttttactgtctaccactacaatggattgaagcagtcaaattataatgaaaaggtcatgtacgtagaagggactgcagttgtgatgggttttgaagatcccatgctacagacagatgacactcctattaaacgctgtctgcaaaccaaatggccatacattgagttactctggaccacagatcgctctccttcactaaattaatttgtctaagtatttataaggaagatcttaataacagatgttgaaagaaggagtcaagactggcaattggctggattaagctaaacactggtatcactgattaactgtaaataacaattaaaaacacattttcagtgttaaaaaaaaaaaaaaaaaaaaaaaaaaaaaaaa

SEQ ID NO: 443 - DNA, 1899 bp, Homo sapiens
  misc feature (327): n equals a,t,g, or c
  misc feature (1878): n equals a,t,g, or c
cttccgcttcagcctcccaaaatgctgtaggtcacagggggggctgtcggggggctgttaggtgcctggatgacaagtggacagtttaagccggttcctcagatcctaatggagctgccccctgccgagcaacaraggctctttaacgaagccgcagccatcatcaggcacctggagtggacggacgccgtgcagctgactgcgctggtcatgggcagcgaggccctgcagcagcagctsctggccatgctggtgaactacgtcaccaaggagctgcgggccgagatccagtatgatgactaggccgcacctccggggaggtgrggnkgcccctttaaatgactctgtgattctgaagaggtggcttgggagttgggagaagcccagcggatgccccctggggaatctccacatcatcagtgtattactagtaatgtcccgctggagaggccaccgctgtgcagtgtcatgttccagaaattactgatgaagcagcatgtgttggtggcatgtgcactggcctgccatgacagccctctgactggccccccagtgaagagtaaaggcctgcctgccgcagyttcggaggcgtctgctgagtcctctcacccgcatgggtctggggaagtgatcacgctcagccgacggtctgaccacacttcatcctccccccggggccttctcatcttgggagatgactcctcttcagagcacctgctgcaggactggatcccaccccsctgcaggtcctggggtctcagggccttggagcagcccatgctggaatcatgtttacctcctagtgcaaccgtcccctacccagggactgtcgaatggccccacggaggggacgggcggcctgctgagtgaagccacaaataccgagtggacttgaccccggcccccactaggctgcacacctagactcgccctgccagggcctcgctcttcccatctgaaaagtcctggtagttcttgaggtttacttctcaaatgaaatatttttagtaaaaagtacaggtatatctcggagatattgtgggttcagttccagaccacctcggtaaagccaacatcacaataaagcaaggaagcgcattgttttagtttcccagtgcatctaagtcatgtttactgcatattgcagtccactaaatgtgcaatagcattatgtctaacaaatatacaaaccttaatttaaaaatatttactgttcaaaatgctgacacagaaacgcaaagtgagcacatgctgttggaaaatggtgccaaatagacttgcctgatgccaggctgctacaaaccttcaatttaaaaaaaaaaaacagtattcacaaagcatagtagaatgaggtatgcctgtattgctctttctgaagtggtgtgatataaaccatctctaagaaatgtttctaccstaaagatttccccagtacagtcagctctcygtaactgtggtctccacatttagatccaaccagccttggataggaaatatttgaaaaaagaaattgcattggtactgaacacgtacagacctttttttcttgccattattccctaaacaatatggtgtagcatatttacatagcatttatattgtatttggtattataagaaatctagagatgatttaaattatacaggaaggtgtgcgtaggttacgtgcaaacgctatgccattgcccatcagggacttgagcatcctcagatgtcggtgtctgagggttgaggttgcagtcctggaacccatcccccatggatactgaggcatagctgtactgtgtgttttcactttgctttcagaactacgacttgaatgtgatcgattacaataaatgtttttctaaaaagccaaaaaaaaaaaaaaaaaaccccngggggggcccggtaccaattc

SEQ ID NO: 444 - DNA, 430 bp, Homo sapiens
  misc feature (395): n equals a,t,g, or c
  misc feature (413): n equals a,t,g, or c
actacaaaaaggagtgctgaagccaatcaccatgtaagcaagataaaagcaaagggggtcttgcctgcccatctctgttccatacattcttaccaggcactgagagtcatggggagtttaagactccatcccacatactccttttgaaactggtccagtgtacaacatccagtgaagagtataggatggcatagacttaccaactcaaagaatggaaggattctagaaacattatagtccaacctcctcaattcatcgttgatacacaaaggcccactaagctgtgtggttcactcagcatcacgtggctaatatgatatgaagccacactagcttgtcctcagctgtgccaagaatgagagctgccttctccaaacctaaaaccaacccatggnatcattaacacctctttnaaatccatagggcagtg

SEQ ID NO: 445 - DNA, 2153 bp, Homo sapiens
  misc feature (166): n equals a,t,g, or c
aggtgcctgggtcgcagcctcttgagacgggagccctccgagaagactcactgcccccgagaatcctactgcacccctggtttgagtccgtcttggaacccgggtacatcgactcagaaataggaacttcagaccagattgttccagagtaccaggaggacagtgnacattagttccttcttctgctaatccccaaaacctcagaaacctcataattcttaacacctggcatttccatttctaaagatggacaggccctttggcgtggtaccaaccagataatgactgcatcaggatgaaagctgctgaactcggcatggygcctcctcttctctgttgggatgagtgactttattgatttgagcagcatatgctgtgattggctgccctgcaaatttgtttcccttaaggaaccctcaccaactatctctgctggatttgggagttccgcatcttttgtggagggcagagtatggacatcttacacccggtggtcaagtgtgtaataaacttgagcattcgaatgggagaaaaagcaaatcgcacaatgacatattttgagtaataaccgtatttttcacagggtgacaaattgggccaataaatctgccatctttgaactcatctttggtggctagactgctacggcagcttctctgatgggaaagttccttttttggcttaacactcaccctttcttcacactcacatttaccaatgactctgctccgtttttggagcagactgttttaagttgctcaggagcctgatggaaccatgaaccgagactcttctctgtttcctgccaagacctcatctgcactaatgccttctccctgaccttgacacttccccctttagctataaaagcacttaccagccgaacgtggaacagtatcacaaaagattccatctcccaacgatttcagaactctgagctcagagagactccagattttaaaaaataatttgagtgcttggaaactattagctttttaagttccttccaaatatgttagtacctaccctttactttttccccaagaccatctcagggtggagcattctgtctaagagaagaaagataaggaggctcccacccacctctcccaagagcagacattaaacatctttgtgctttgaagagagtgaattttggatagtcttgtgattctcagactaacttccagaattatactttaacccctcccagatatggtccgcctttggcattgtgtgtacatctgcagttttgcatggtgggttgttaatatttcaaatgtgtggtttatgaatacgtctgtataatcggcttctggagtgaaacagcaaaccccaaatcttcaaagttggaaggaactttaaaaatcatccggtccaatctctttcctctttctgccacctcccaaggcagaaatcccctcttcagcttcttttgtaggtgggaatccagcctctgttagatatgtccagagatggaaactcactcccctacaaaagatggagcttaatggagaaattgcaactttcattaaaaaacaaattcagatgaaatatcagtaactgtcttggacagtgctgaaatcaggtggttaaacgggtaaacaaaatatactgtattttgagaaatggcacaaaaacaggcagtcatctttaagggctatgcctaggcaaactactaacatgcattgtgagaatgccgtgtatacctcacgtactgtgtactttgtacatatattttaccttttatacctatgttcgattttgttttgttttgttttgttctggctttgaggcttgttttgttgtctgtgtctgtctgaataacctgcgtgtctaaaaccacgtgaaatgtgaatgattattggcaatattaccttgacagaatcatgggactttgagaagagggaggacagaggcctctgtcgcactaacgctctcgtggttgctcgactgttgtatctgtgatacattatccgactaaggactctgggctggcagggccttctgccgggaaagctagaaacactaggttcttcctgtacatacgtgtatatatgtgaacagtgagatggccgtttctgacttgtagagaaattttaataaacctggtttcgtaaaaaaaaaaaaaaaaaaaaaaaaaaaaaaaaaag

SEQ ID NO: 446 - DNA, 492 bp, Homo sapiens
  misc feature (305): n equals a,t,g, or c
  misc feature (474): n equals a,t,g, or c
  misc feature (475): n equals a,t,g, or c
  misc feature (489): n equals a,t,g, or c
ggcacgagctggccagctccgagttctcccatgaagccgtcaagacgcacattgacaccgtcatcaatgccctcaagacggagcgggacgtcagcgtgcggcagcgggcggctgacctccyctacgccatgtgtgaccggagcaatgccaagcagatcgtgtcggagatgctgcggtacctggagacggcagactacgccatccgcgaggagatcgtcctgaaggtggccatcctggccgagaagtacgccgtggactacagctggtacgtggacaccatcctcaacctcatccgcattgcgggncgactacgtgagtraggaggtgtggtaccgtgtgctacagatcgtcaccaaccgtgatgacgtccagggctatgcccgcaagcccgtctcccgtcacctgtgtgagctgctggcacagcagttctgagccctggactctgccccgggggatgtggccggcactgggcanncccttggacttgangca

SEQ ID NO: 447 - DNA, 1539 bp, Homo sapiens
  misc feature (1): n equals a,t,g, or c
  misc feature (20): n equals a,t,g, or c
  misc feature (25): n equals a,t,g, or c
natcatagaggaaacggtantctgncagtaccgtccgaattcccgggtcgacccacgcgtccgggcaaactagacattgtaatgcataagatgcaggaaaaagtgcagagcattaactataacccttttgaccagaaactttatgtctataacgatggttaccttctgaattatgatctttctgtcttgcagaagccccagtaagctgtttaggagttagggtgaaagagaaaatgtttgttgaaaaaatagtcttctccacttacttagatatctgcaggggtgtctaaaagtgtgttcattttgcagcaatgtttaggtgcatagttctaccacactagagatctaggacatttgtcttgatttggtgagttctcttgggaatcatctgcctcttcaggcgcattttgcaataaagtctgtctagggtgggattgtcagaggtctaggggcactgtgggcctagtgaagcctactgtgaggaggcttcactagaagccttaaattaggaattaaggaacttaaaactcagtatggcgtctagggattctttgtacaggaaatattgcccaatgactagtcctcatccatgtagcaccactaattcttccatgcctggaagaaacctggggacttagttaggtagattaatatctggagctcctcgagggaccaaatctccaacttttttttcccctcactagcacctggaatgatgctttgtatgtggcagataagtaaatttggcatgcttatatattctacatctgtaaagtgctgagttttatggagagaggcctttttatgcattaaattgtacatggcaaataaatcccagaaggatctgtagatgaggcacctgctttttcttttctctcattgtccaccttactaaaagtcagtagaatcttctacctcataacttccttccaaaggcagctcagaagattagaaccagacttactaaccaattccaccccccaccaacccccttctactgcctactttaaaaaaattaatagttttctatggaactgatctaagattagaaaaattaattttctttaatttcattatgracttttatttacatgactctaagactataagaaaatctgatggcagtgacaaagtgctagcatttattgttatctaataaagaccttggagcatatgtgcaacttatgagtgtatcagttgttgcatgtaatttttgcctttgtttaagcctggaacttgtaagaaaatgaaaatttaatttttttttctaggacgagctatagaaaagctattgagagtatctagttaatcagtgcagtagttggaaaccttgctggtgtatgtgatgtgcttctgtgcttttgaatgactttatcatctagtctttgtctatttttcctttgatgttcaagtcctagtctataggattggcagtttaaatgctttactcccccttttaaaataaatgattaaaatgtgctttgaaaaaaaaaaaaaaaaaaaaaaaaaaaaaaaaaaaaaaaaaaaaaaagggcggcc

SEQ ID NO: 448 - DNA, 3983 bp, Homo sapiens
  misc feature (60): n equals a,t,g, or c
  misc feature (67): n equals a,t,g, or c
  misc feature (227): n equals a,t,g, or c
  misc feature (328): n equals a,t,g, or c
  misc feature (1010): n equals a,t,g, or c
  misc feature (3067): n equals a,t,g, or c
  misc feature (3255): n equals a,t,g, or c
tgtccccttcccttggtatccctataactttacctgttggacaggtagggggaagggganagtaatnagtctcacctgctaaagagcaagggtggggcaagacacaccccatcccttccattggttttttccttagtcttactgacagagccttgtccaatcaggaggaagtaactttctatctgccaatagatgcaatgttaggatgagacctcaagttagagtcnatccctagagccgactggcagtccccggggccaatggcaagcggataaacagaggcggccgtggaagaggactggaggcgagctccgcccctccacggganagtcaggcgagatagccagtgagctcgcaccagagggtgggcgtctcccccaggggcggagcttcgaggtggcgaggggcgtggcttggctgtcaggtctcttcgccttttgttcggttactgagttgctgccttggccagagtccggagcagccgccgcccgaccrcgccgagctcagttcgctgtccgcgccggctcccaccccggcccgaccccgacccggcccggtcaggccccatactcagtagccacgatggaggtgatgaacctgatggagcagcctatcaaggtgactgagtggcagcagacatacacctacgactcgggtatccactcgggcgccaacacctgcgtgccctccgtcagcagcaagggcatcatggaggaggatgaggcctgcgggcgccagtacacgctcaagaaaaccaccacttacacccagggggtgccccccagccaaggtgayctggagtaccagatgtccacaacagccagggccaaacgggtgcgggaggccatgtgccctggtgtgtcaggcgaggacagctcgcttctgctggccacccaggtggaggggcaggccaccaacctgcagcgactggccgagccgtcccagctgctcaagtcggccattgtgcatctcatcaactaccaggacgatgccgagctggccactcgcgnccctgcccgagctcaccaaactgctcaacgacgaggacccggtggtggtgaccaaggcggccatgattgtgaaccagctgtcgaagaaggaggcgtcgcggcgggccctgatgggctcgccccagctggtggccgctgtcgtgcgtaccatgcagaataccagcgacctggacacagcccgctgcaccaccagcatcctgcacaacctctcccaccaccgggaggggctgctcgccatcttcaagtcgggtggcatccctgctctggtccgcatgctcagctcccctgtggagtcggtcctgttctatgccatcaccacgctgcacaacctgctcctgtaccaggagggcgccaagatggccgtgcgcctggccgacgggctgcaaaagatggtgcccctgctcaacaagaacaaccccaagttcctggccatcaccaccgactgcctgcagctcctggcctacggcaaccaggagagcaagctgatcatcctggccaatggtgggccccaggcctcgtgcagatcatgcgtaactacagttatgaaaagctgctctggaccaccagtcgtgtgctcaaggtgctatccgtgtgtcccagcaataagcctgccattgtggaggctggtgggatgcaggccctgggcaagcacctgaccagcaacagcccccgcctggtgcagaactgcctgtggaccctgcgcaacctctcagatgtggccaccaagcaggagggcctggagagtgtgctgaagattctggtgaatcagctgagtgtggatgacgtcaacgtcctcacctgtgccacgggcacactgctccaacctgacatgcaacaacagcaagaacaagacgctggtgacacagaacagcggtgtggaggctctcatccatgccatcctgcgtgctggtgacaaggacgacatcacggagcctgccgtctgcgctctgcgccacctcactagccgccaccctgaggccgagatggcccagaactctgtgcgtctcaactatggcatcccagccatcgtgaagctgctcaaccagcccaaccagtggccactggtcaaggcaaccatcggcttgatcaggaatctggccctgtgcccagccaaccatgccccgctgcaggaggcagcggtcatcccccgcctcgtccaactgctggtgaaggcccaccaggatgcccagcgccacgtagctgcaggcacacagcagccctacacggatggtgtgaggatggaggagattgtggagggctgcaccggagcactgcacatcctcgcccgggaccccatgaaccgcatggagatcttccggctcaacaccattcccctgtttgtgcagctcctgtactcgtcggtggagaacatccagcgcgtggctgccggggtgctgtgtgagctggcccaggacaaggaggcggccgacgccattgatgcagagggggcctcggccccactcatggagttgctgcactcccgcaacgagggcactgccacctacgctgctgccgtcctgttccgcatctccgaggacaagaacccagactaccggaagcgcgtgtccgtggagctcaccaactccctcttcaagcatgacccggctgcctgggaggctgcccagagcatgattcccatcaatgagccctatggagatgacwtggatgccacctaccgccccatgtactccagcgatgtgccccttgacccgctggagatgcacatggacatggatggagactaccccatcgacacctacagcgacggcctcaggcccccgtaccccactgcagaccacatgctggcctaggcggcctggccccagtacggccccctctttgcaggcttttcctcctctctagaacctccttctgttggaggccctcccatctccccgctgaaacctgcgctccttttttggggggatcctttgctgctgagcttccccaagcacggtgtgccctggcctgccttcttcttgtgtctttggtggggatggggaggcctattcctgctggccccttctgggggtggtgggcaggtgacacggagtgcnttgagcttctggggatgcaggtccaccgagcccctgamccctgtytgtccccgctcccctaacaggtgcggttcctcatctgagaggctctccgtgcaggcgatggggcaagacagaaaagtgcctgagctggggaagccggggtgtaacttcctgctgcaccctgcgcctccagaggtcctccgtanggtctttcttgggatagtgttctgctcctgcttttctgtcctgggcatgggtccagggcctgacaccccctccccgcccctgtggccctggccactaaagcttcagactcaagtacccattctgttttcccccagcaacgcccctccaaacctccagcctccctgtctccagctgcctgggcccggaagggctttggttccttctctgggtctgattttctcactgaactccaccgaccaactgccctaagcccccagggcctccagggcccaggttcgagacccaaacccccaaaatccaaaacttctcttgaaaagttcagggaccgtccaggggagatggggaggagatatggagtgagtcacctgctccagaagatgccagcttctctctccagggtgcttagttggctttgcccacccctcactccccagggagctctggggacagcttcctcacacccctgtcccacccacacagctgccctagctgaccccgagaagtgctcttggctgacccctctggtgtgtggtgaggggctttctcttccccttcctgtttcagacccccccatttcccgcacatggtgtggggggctgggggaggtccaagcagagtgttttattattatcgctttatgtttttggttattggtttttttgtatagaccaaagcaaagaaaataaaaataacacagatgaaaaaaaaaaaaaaaaaaaaaaaaaaa

SEQ ID NO: 449 - DNA, 1177 bp, Homo sapiens
  misc feature (298): n equals a,t,g, or c
accttgagtgtccttggcaacctagcctttgacattgatgtttttccataggattttcttcatttgggttggaataaaaatgcatttttattcacaaggcacagacagataagaatatcataagcagggaagtgtctccaaaggtcaggacttatgtttttctgttgagtgctatatgtggaggttattgcaagttccctgatatgagtatggtttcgcttgctacattgtgcctattaaagtaaaattttacacaagcctcgcatttctaagattagtgttcccgaatgaaatgttnaagaaaacattaaaagattatctctttttaagatggaggaaaaaaagtgaacaaagctaattaatctataatgaaaattgcacaaaataacatttcttaacaaatttaatacaattttgtgttctttgttgctagtggtataaaacgagatttttttccctcatttttctcattgtagatgtcatctctcacatttatatcagtgaggtttgaaattctgtgtagcagttactcagcacatatgagagggcagcgaatgaatgagatttgtcatgtgctaataaaagctgaatttttgtaatctaaaatgatgtattttctactattgctgttaatttgcattgttaaaaattcttaaagtttaatatgttatgttcagtcattgaaagcgaccactcatttttttyttaaagttgatgccttttctgctgtgctagagtcagtattttgcttctggcaggagagctgcaaactgtgtatcctcaaacagatgcaaaaagtagtgctttgcaaaacgtttgttttctgtttatctcagattaacatcctttaatacaagtttcttaagtgtaacttgtatttctgaaaatgcttaaaattattttatatttccctttgggaatttttctctatttccagcacgctgatttgatttaaaaatgtaataagaccaagagttggagtaaagggatattcattccatgttaaaagtggcttcatagctactgacaaatgtctgaactattgtcgtgcccttcaaaactggagttttctaaaataatcttatttttatacttgtatgttccagcaatttaagatatataccattgaaagggaaataaaacatttttgtttatttgaataaataatactcccaaa

SEQ ID NO: 450 - DNA, 2428 bp, Homo sapiens
  misc feature (2009): n equals a,t,g, or c
  misc feature (2037): n equals a,t,g, or c
  misc feature (2343): n equals a,t,g, or c
  misc feature (2348): n equals a,t,g, or c
  misc feature (2375): n equals a,t,g, or c
  misc feature (2387): n equals a,t,g, or c
  misc feature (2420): n equals a,t,g, or c
ggcggcccgggagcgtggggtatctcgaggtgccgggttgcaggcgctcaggagcgctagggtttgaggcctgctttctgctcgcgccagcagagcactacctgaggcagcgaggcgcagcgagcctagcctccccgcgccctgggcagtgtggccatggagaatcaggtgttgacgccgcatgtctactgggctcagcgacaccgcgagctatatctgcgcgtggagctgagtgacgtacagaaccctgccatcagcatcactgaaaacgtgctgcatttcaaagctcaaggacatggtgccaaaggagacaatgtctatgaatttcacctggagttcttagaccttgtgaaaccagagcctgtttacaaactgacccagaggcaggtaaacattacagtacagaagaaagtgagtcagtggtgggagagactcacaaagcaggaaaagcgaccactgtttttggctcctgactttgatcgttggctggatgaatctgatgcggaaatggagctcagagctaaggaagaagagcgcctaaataaactccgactggaaagcgaaggctctcctgaaactcttacaaacttaaggaaaggatacctgtttatgtataatcttgtgcaattcttgggattctcctggatctttgtcaacctgactgtgcgattctgtatcttgggaaaagagtccttttatgacacattccatactgtggctgacatgatgtatttctgccagatgctggcagttgtggaaactatcaatgcagcaattggagtcactacgtcaccggtgctgccttctctgatccagcttcttggaagaaattttattttgtttatcatctttggcaccatggaagaaatgcagaacaaagctgtggttttctttgtgttttatttgtggagtgcaattgaaattttcaggtactctttctacatgctgacgtgcattgacatggattggaaggtgctcacatggcttcgttacactctgtggattcccttatatccactgggatgtttggcggaagctgtctcagtgattcagtccattccaatattcaatgagaccggacgattcagtttcacattgccatatccagtgaaaatcaaagttagattttccttttttcttcagatttatcttataatgatatttttaggtttatacataaattttcgtcacctttataaacagcgcagacggcgctatggacaaaaaaaraaaaagatccactaaaaagaaagatttagatggcttcttgccagtttgagcctaatctgattcttacagttttaccttcttgaaccaatgtaaaagtttttttaatgttaaatgattaaattctcagtgaggctatcttccttttccccagtaacattcctgaatttactgttatcttattgtagtacttgcatgacatggattcctgatatctgatgagaggttcattcttgtgtattcagttaatgacaccaaaaggctcagcccaccccaaccctatctcatgttcagtctgtctaatacatgccagagatttttttttcaaaaagtgctttatccctacaatgtactgacagttcttacagttgagatttgttcttttcagctattgcttgtgaaaaaaagcaagactatgtcactctatagaaggctgttaaagtgactcaggcaggaattaattattctgtacctaaggggttacttgtttaatgggatggcattgactttttgaaaatcaagtggactgagtcattgataaaacatttctaagagtggggctagagaacatactttacatctgacatcctttggcctaacaacatctattattatagtgctcagcagtgtgggcattgaagaggcgcagaatgctttgaaagaaactaatcagaatcttggaacatcatgatcatgccattcttaagtaaatcaactattttcaacactgaagaaaaatgaaacattatttagaaaacaatgagattacaagttccaaactncagccaggaatgtgggctcacacctgtnaatcccagcactttgggacacctaggtgggagcatcgcttgaagccaggagttcaagaccagcttgggcaacgtagtgaggacccctatctctacaaaaaataaaaaaattagctgggtgtgatggcacacacctgttgtcccagctactcaagaagctgagatgggaggatcctgagctcaggaggtcaaggctgcagtgagccgagaatgtgccactgcactgcagctggggtgacagtgcaagaccctgtcttcaaaccaaaccaaaccacacacacacaaacacacatacacacacacacanacganggtccaaatggtagcagggatccaaangggacacagtangtagggtcaaactgggcagttacagtgtacagnctttgaca

SEQ ID NO: 451 - DNA, 2485 bp, Homo sapiens
  misc feature (222): n equals a,t,g, or c
ggcacgagtggcggccgagccgtgtgtctcctcctccatcgccgccatattgtctgtgtgagcagaggggagagcggccgccgccgctgccgcttccaccacagaaatcaagatgactaccagctggttcgaaaattaggccgaggtaaatacagtgaagtatttgaagccatcaacatcacaaataatgaaaaagttgttgttaaaattctcaagccagtnaaaaaagaagaaaattaagcgtgaaataaagattttggagaatttgagaggaggtcccaacatcatcacactggcagacattgtaaaagaccctgtgtcacgaacccccgccttggtttttgaacacgtaaacaacacagacttcaagcaattgtaccagacgttaacagactatgatattcgattttacatgtatgagattctgaaggccctggattattgtcacagcatgggaattatgcacagagatgtcaagccccataatgtcatgattgatcatgagcacagaaagctacgactaatagactggggtttggctgagttttatcatcctggccaagaatataatgtccgagttgcttcccgatacttcaaaggtcctgagctacttgtagactatcagatgtacgattatagtttggatatgtggagtttgggttgtatgctggcaagtatgatctttcggaaggagccatttttccatggacatgacaattatgatcagttggtgaggatagccaaggttctggggacagaagatttatatgactatattgacaaatacaacattgaattagatccacgtttcaatgatatcttgggcagacactctcgaaagcgatgggaacgctttgtccacagtgaaaatcagcaccttgtcagccctgaggccttggatttcctggacaaactgctgcgatatgaccaccagtcacggcttactgcaagagaggcaatggagcacccctatttctacactgttgtgaaggaccaggctcgaatgggttcatctagcatgccagggggcagtacgcccgtcagcagcgccaatatgatgtcagggatttcttcagtgccaaccccttcaccccttggacctctggcaggctcaccagtgattgctgctgccaacccccttgggatgcctgttcagctgccgctggcgctcagcagtaacggccctatctgtctcctgatgcctgagcagaggtgggggagtccaccctctccttgatgcagcttgcgctggcggggaggggtgaaacacttcagaagcaccgtgtctgaaccgttgcttgtggatttatagtagttcagtcataaaaaaaaaattataataggctgattttcttttttctttttttttttaactcgaacttttcataactcaggggattccctgaaaaattacctgcaggtggaatatttcatggacaaatttttttttctcccctcccaaatttagttcctcatcacaaaagaacaaagataaaccagcctcaatcccggctgctgcatttaggtggagacttcttcccattcccaccattgttcctccaccgtcccacactttagggggttggtatctcgtgctcttctccagagattacaaaaatgtagcttctcaggggaggcaggaagaaaggaaggaaggaaagaaggaagggaggacccaatctataggagcagtggactgcttgctggtcgcttacatcactttactccataagcgcttcagtggggttatcctagtggctcttgtggaagtgtgtcttagttacatcaagatgttgaaaatctacccaaaatgcagacagatactaaaaacttctgttcagtaagaatcatgtcttactgatctaaccctaaatccaactcatttatacttttatttttagttcagtttaaaatgttgataccttccctcccaggctccttaccttggtcttttccctgttcatctcccaacatgctgtgctccatagctggtaggagagggaaggcaaaatctttcttagttttctttgtcttggccattttgaattcatttagttactgggcataacttactgctttttacaaaagaaacaaacattgtctgtacaggtttcatgctagagctaatgggagatgtggccacactgacttccattttaagctttctaccttcttttcctccgaccgtccccttccctcacatgccatccagtgagaagacctgctcctcagtcttgtaaatgtatcttgagaggtaggagcagagccactatctccattgaagctgaaatggtagacctgtaattgtgggaaaactataaactctcttgttacagccccgccaccccttgctgtgtgtatatatataatactttgtccttcatatgtgaaagatccagtgttggaattctttggtgtaaataaacgtttggttttatttatcaaaaaaaaaaaaaaaaaaaaaaaaaaaaaaaaaaaaaaaaac

SEQ ID NO: 452 - DNA, 963 bp, Homo sapiens
gcgcgccgggcctcctcgcctttgtgccatccgggtctctcgcgcgagcgatttagtctgaggcgaagcttcggagcggccggtactgttgaaagcgacaagtggaggcgccgctctagcggccgggactctgaactatggcggctagtgatacagagcgagatggactagccccagaaaagacatcaccagatagagataagaaaaaagagcagtcagaagtatctgtttctcctagagcttcaaaacatcattattcaagatcacgatcaaggtcaagagaaagaaaacgaaagtcagataatgaaggaagaaaacacaggagccggagcagaagcaaagagggaagaagacatgaatccaaagataaatcctctaagaaacataagtctgaggaacataatgacaaagaacattcttctgataaaggaagagagcgactaaattcatctgaaaatggtgaggacaggcacaaacgcaaagaaagaaagtcatcaagaggcagaagtcactcaagatctaggtctcgtgaaagacgccatcgtagtagaagcagggagcggaagaagtctcgatccaggagtagggagcggaagaaatcgagatccagaagcagagagaggaagaaatcgagatccagaagcagggaaagaaaacggcggatcaggtctcgttcccgctcaagatcaagacacaggcataggactagaagcaggagtaggacaaggagtaggagtcgagatagaaagaagagaattgaaaagccgagaagatttagcagaagtttaagccggactccaagtccacctcccttcagaggcagaaacacagcaatggatgcacaggaagctttagctagaagagaaagaccgggggtctcccttattgtttgcccaggctgggtaacacagtgtaacctgatgttgcttcccctgggaacccagcctgacagaaaactgcagc

SEQ ID NO: 453 - DNA, 604 bp, Homo sapiens
  misc feature (12): n equals a,t,g, or c
  misc feature (517): n equals a,t,g, or c
  misc feature (540): n equals a,t,g, or c
  misc feature (567): n equals a,t,g, or c
  misc feature (593): n equals a,t,g, or c
gggcacgcaggnaagtagttattactagtaaaagcggagagatcttgtatcgtatttcaccgtgggcaaagtatgtggttcgtgaaggtgataatgtgaattatgattggatacactgggatccagaacactcatatgagtttaagcattccagaccaaagaagccacggagtctaagaatttatgaatctcatgtgggaatttcttcccatgaaggaaaagtagcttcttataaacattttacatgcaatgtactaccaagaatcaaaggccttggatacaactgcattcagttgatggcaatcatggagcatgcttactatgccagctttggttaccaaatcacaagcttctttgcagcttccagccgttatggaacacctgaagagctacaagaactggtagacacagctcattycatgggtatcatagtcctcttagatgtggtacaagcscatgcttcaaaaaattccagcagatgggattggaatatggtttggatgggggacagattccnggttaattttccattcctgggancctagaaggggactccatggatctttngggggatagccagaattgtttggccncaatccccagt

SEQ ID NO: 454 - DNA, 1917 bp, Homo sapiens
  misc feature (1256): n equals a,t,g, or c
ttctttttaaaatgttaatgcccgttgtctttcctgggctgtttgctagcggaaggatgccagggaagccagcaggagctaggagagagtccgtggatctcgaaagaaatatgggagacagatgcccggcggtgcgtctggagatggggacggcgggagttgagttgtggcagtagtygagttgtaatttgtgggcggaggcagkaggagactccccacccttcacccctgccccactctgtccccagttccgccatttgtgaggccagaggtttccggactgttggcctcgcaggcagccgtctcccgccccagggcaatcccccagtccctcccgcctccacgagagcctggagctctcagcctcgcccggggctccactctctcctccggctccctgggctgttttgctctaacgatcttgccagatccctccctctgtagacaaccaccaacctctgtttgctgttgaattctctcctcacattacccaggtctgctcaagacatgattttggttttggtttctgagggttctagtgggcagaaggttggagggacacttatgagggtggccgggggtctgacgctgcactttggaaaaactcacacagttgaatttccaaagaaatctgccctttgccctctttgcacctttgatacattctggaagttttctcaggctttggacacttctggggatggaggtgtggagaagtggggagttccctctcttcatagtaaataactctgaaatatgtgaatgtgaatggcaggagaatctggccaaggatggggccgaaaagggtggttctaattgtttgcttctgatgttgagtctttagctgaccccacaggcaggtttccaaggtgcaaagagatctttcccgagtcagcggccccatcctcatcctccctccctttacttcctcactgtgcagtctccctcaaggatctactgtgaaaggtgtgtttgtagtgatatccaacctaactcagtaacgaagtcgttacttagctcttagctgtgaaataactctggaaacttccccaccccaaccataaattcttacttataaagaaacaggtccccaaactggaaacagcttagtccaggcctcagcgagaaggaaggacaccatgactgctccatgctgggcacagccgggcagtcttgccaagtgcctgctggaggctgtgccggcaagaggcctgcagcaaggagattcccttccctcgggccattatcaatactknctttatctggaggtggggaagcgcagccctctgagacagcaggacaatggtcagttcagagagggtgagggcagcaaacgcttcagaggacacagaagccagaggacccccccccgccccacagctgggtcagcctggaaaatccatctattagggactttttggcagccagatggcagcaatagcccattaggtctcatcccgagttccaagtcttggctgcaaatgagcctcagttcgccttactggagagcacccccagattcctgggcacagttcatttccagccctttctagatctgatcttttagggggaaagacagcttaaaatgttcttttcattttaaagaaaattattctgtctgcttaagttggaggctacttactctttcacctgacattttctttccttttattcttccagatcaggaatgaaatttccatgctgctcataaagataatattattgtactaattatttttattaccattgtaattatgatcattatgttgatattttagtcagggttttaaatgcacatttattccaagtatctttgtgttttctctttaatatttaaacttattctctctgtgagtatataagtagactggagggacatccagatgtccagttttgtcaggcaaaaaaaaaaaggaa

SEQ ID NO: 455 - DNA, 1538 bp, Homo sapiens
cgcagcttgatggcgtcgggctggagagccgcagtcccggctgcagcacctgggagaaggcagaccgtgtgagggggcctgtggcccagcgtgctgtggcctcsgggagtgggaagtggaggcaggagccttccttacacttcgccatgagtttcctsatcgactccagcatcatgattacctcccagatactattttttggatttgggtggcttttcttcatgcgccaattgtttaaagactatgagatacgtcagtatgttgtacaggtgatcttctccgtgacgtttgcattttcttgcaccatgtttgagctcatcatctttgaaatcttaggagtattgaatagcagctcccgttattttcactggaaaatgaacctgtgtgtaattctgctgatcctggttttcatggtgcctttttacattggctattttattgtgagcaatatccgactactgcataaacaacgactgcttttttcctgtctcttatggctgacctttatgtatttcttctggaaactaggagatccctttcccattctcagcccaaaacatgggatcttatccatagaacagctcatcagccgggttggtgtgattggagtgactctcatggctcttctttctggatttggtgctgtcaactgcccatacacttacatgtcttacttcctcaggaatgtgactgacacggatattctagccctggaacggcgactgctgcaaaccatggatatgatcataagcaaaaagaaaaggatggcaatggcacggagaacaatgttccagaagggggaagtgcataacaaaccatcaggtttctggggaatgataaaaagtgttaccacttcagcatcaggaagtgaaaatcttactcttattcaacaggaagtggatgctttggaagaattaagcaggcagctttttctggaaacagctgatctatatgctaccaaggagagaatagaatactccaaaaccttcaaggggaaatattttaattttcttggttactttttctctatttactgtgtttggaaaattttcatggctaccatcaatattgtttttgatcgagttgggaaaacggatcctgtcacaagaggcattgagatcactgtgaattatctgggaatccaatttgatgtgaagttttggtcccaacacatttccttcattcttgttggaataatcatcgtcacatccatcagaggattgctgatcactcttmccmaggtgatactatgaccatgagtagcatcagccagaacatgagagggagaactaactcaagacaatactcagcagagagcatcccgtgtggatatgaggctggtgtagaggcggagaggagccaagaaactaaaggtgaaaaatacactggaactctggggcaagasatgtctatggtagctgagccaaacacgtaggatttccgttttaaggttcacatggaaaaggttatagctttgccttgagattgactcattaaaatcagagactgtaaaaaaaaaaaaaaaaaaaagggcggcc

SEQ ID NO: 456 - DNA, 2189 bp, Homo sapiens
  misc feature (17): n equals a,t,g, or c
ggcatattaataaatgnaattaaatgtcttaataagcagctggctgaactctagagagaactgctgtagacttctgcaatcagtctctgtattggtatatccagtactatcgggtttaggttctttttatttttccttaaatcttacttgtttctagcgtcttaagagtggtaatggtaaaatgtgaagttacaataaacttctgcttgttttctcagaacatctttggcatgaggaagaactttttgtgaatgatacagtagtctcagcatctgttaatttgtggttttcaaagcatttttgacagagtttacctaatgtaaaaagattaaacagttttataaaacacaaataaacattcctacctgaactgtgaggaacagagtgtatagtacaaatgtaattaggcattgcctcctggcgaggttcttgatgcatgacttcgatgctggctgctgactgaggtgaccactgtcagtattgtactttggcatatgttgtttttaggraaataatggaatgcattcttagattaacttactgtttttgagttggaaaaaataaaagatgaggtattataagtatgccaaatatttatacactacaaaagattaaaaaaggagagggagaaaaaaaaaggccagttatgattttaatagcgtctaatttttttttgactcgaattttgtggacactagtcaattgcataatttaacatggaggagctttcatttaaaagaagttctcagctactatattctgccattaaaattaaccatgcctgttaattttacattgcttgaagatataagtaagctgccgtcaatattgttttaagattttcttatagtttatgtttaaatggaaaagttacatatataatctatggtgcagggtcaggcattggccattaaagataagtttggctaactattttactgaagagactaatggtcttccctctgttgtactgctatgtttcttgatctgtttttccccaatgtaacagtctacattgaagtcctttagctctctccatatactaattgacatttgttaaggattcaatattttgtgaattctttttacccttaaaatgcatatctttcagagagataagaatgaattttgcaataatttatatgcagagtgtgcttatgggtttctgggagttcaagttagtaccccagagtgcttaaaagtatgatgctaaattctaaggctaatgtaatgactgtagattatctatgtccacattgttcaacagaaatataatgtgaaccacaacataatttttaattttctagtagccatattaaaaaagaaacaagcaaaattaattttaataacagtttatgtaacccagtatattaaaaatatcatttcaacatgtaatcaatataaaagattattaatgaaacaccttatcttctttttcttccatactaagtcttagatttgagtgtattttgcactcacagcacatctcaattctgactggccacattttaagtgctcagtagtcacatatggctaagggctactatactggacagtacagattcatagagtataaaatatgactttaactttggagatggtgaggtaggcctgtaattatggtactttaaaaattcagaatatttagaaaagcatctaatagaattatccacttgwtttccttcatcttcattttaatatgttctagaagtaggatcagcctgttccaatttgccaagcattattaaggaggaataattccataccatgtaaaataccatgatatgctgattatactacattaacaaatttttaagttgcgttcactaaattctgtcctgtttcttcaaaataatatagcttaaattgcatgttaattgtatatcttacctattttgtttttatattattcttacaatataatcatgtatattaacaaacagccctgggattctaatcttcctctgcaactgtcttccaggacttactggcacttattacactgtgataagtggcagaaaagtagaatgaaatattctttttccattagatttgttcttatgtgaccatgtaccaagccagctataaagtattgtatttctgtagaatatggaaaatagtatttgtcttacctttgctaaatgtttgcaatttctaagtaaaccttttatctcctaaaaaaaaaaaaa

SEQ ID NO: 457 - DNA, 1399 bp, Homo sapiens
gcaccccgccttgtagtgacctgtcggcacgtgtcccctcgggaagcagccagggtcctggtgcgctccaccacccccaagagtgtggccatctggggccgtgtggtatttgccactcaggagacatgtccctatgacatagcagtggtgagcctggaggaggacctggatgatgtccccatccctgtgcccgctgagcacttccatgaaggcgaggctgtgagtgtggtgggctttggcgtctttggccagtcttgcgggccctcggtgacctcaggcatcctttcggctgtggtgcaggtgaatggcacgcccgtaatgctgcagaccacgtgtgctgtgcacagcggctccagtgggggacccctcttctccaaccactcaggaaacctccttggcataatcaccagcaacacccgggacaataatacgggggccacctacccccacctgaacttcagcattcccatcacggtgctccagccggccctgcagcagtacagccagacccaagacctaggtggcctccgtgagctggaccgcgctgctgagccagtcagggtggtgtggcggttgcagcggcccctggcagaggccccgcggagcaagctctgaggctgtgttaccacctttggaaagaagagtgacctttttctgctgtaggaagtgatgttgaggtgacggtggcctcaggattcagggcccagcccctgcaggggcccaggctgcctctcatctccacccactgactgcagactgggctttgggctctggggcaaacttctcttcagccccatggatccttaacctggcagcccgttttggggtgctttcttgagcccccagttctctgtcccctagcactagactcagctgtattgtttttccttctggggagcccactccaactgcacagaagttctgggcctgacaggtagattccagctggaaggcaggcccgtgcctggttttgcgtctgttcccctgagggccatcgtcatcctggagcttcaatggggccttggctcctgtctgcctctcagtcagagtcagggctgacaaaggactcagcttccttagcatctcagcagaaaccttgctctgaagaccagagacagaagggacagaaacaggagtgcctcctgctgtgccaggcccatgggcagtgcaggcagatccctgaaggtcagcactcctgggtcttcatatgccaacaggggcgctcttgacactgtgccttcattttccagcccacagcctgggtctcagggatcttgaggggtagaacatgtctggttggggcttgggaataaacatgatctattgaaaaaccwcwrtatttatatttcaaaaaaaaaaaaaaaaaaaaaaaaaaaaaaaaaaaaaaaaaaaaaaaaaa

SEQ ID NO: 458 - DNA, 709 bp, Homo sapiens
  misc feature (57): n equals a,t,g, or c
cacgagcggtcacgagatttaatgtttccaaggttagacgttcactttttgagacgnttgagtagcttttcacttaattgactagcatgtatgggtttctttacccaggtccacaattcactacacaggtccagaaaaaaagctgatctctgaaaagcactaggagaaggcagctagagagggagaattctaattaggccggggtcctctgtggcttgaatgactgaataagtttttatagtcttcaattcagtgacttccagattcttcccaaagaaatttctagrgatcaagagtaggctctttcggaagtacttgcccgtattacactttaattttacaaaccaaacaacagcaattcaaccaatcaaacaacaaaaacaatccaaagaaagagacttggacataggcatcaaggaatcatttcactttataatttaatagaacactggtgtatcattcattaattctgaaagtgagaactaaatgtaaaataattttgtaaggtttgtgaattgttgcctaggtattctggtgatgtttactttagtgattttatcattaatgaaagcaatgtgtttttttagaaaacatattattagggttcataacgttgacattctgttggtgcaatcataatctcctgttttgttttagtcctagctctacagttgaatgaatccaagctcacctccaggccttttgctat

SEQ ID NO: 459 - DNA, 1283 bp, Homo sapiens
  misc feature (86): n equals a,t,g, or c
  misc feature (145): n equals a,t,g, or c
agcagtctgccgtggccatgtacatgctctataagaagcagaagcagcagaacgtggcccactgcatgctggtaagcaaccgcgtnctcctggtgggggagcacgctggccatgctgcagcgccttcaaggagcagcagttcgtnatcgccggggtcttggtggaggacagcaacaaccaccacctcatgctggaggccagcragtgggccaccatcgaggggctggtggagctcctgcagcccttcaagcaggtggccgagatgctgtcggcctccaggtaccccaccatcagcatggtgaagccgctgctgcacatgctcctraacaccacgctcaacatcaaggagaccgactccaaggagctcagcatggccaaggaggtcatcgccaaggagctttccaagacctaccaggagacgcccgagatcgacatgtttctcaacgtggccaccttcctggacccccgctacaagaggctgcccttcctctccgccttcgagcggcagcaggtggagaatcgcgtggtggaagaggccaagggctgctggacaaggtcaaagacggcggctaccggccggctgaggacaagatcttcccggtgcccgaggagcctcccgtcaagaagctcatgcggacatccacgccgccgcccgccagcgtcatcaacaacatgctggccgagatcttctgccagacaggcggcgtggaggaccaggaagagtggcatgcccaggtggtggaggagctgagcaacttcaagtcccagaaggtgcttggcctcaacgaagaccccctcaagtggtggtcagaccgcctggccctcttccccctgctgcccaaggtgctgcagaagtactggtgcgtgacggccaccgcgtcgcccctgagcgtctcttcggatccgccgccaacgtggtcagcgccaagaggaaccggctggctcccgcgcacgtggaacgagcaggtgtttctgtatgaraacgcccggagtggggcagaggcggaacccgaggaccaggacgarggggartggggcctggaccaggagcaggtgttctccttgggggatggcgtcasggcggtttctttggcattagggacagcagcttcctgtagcgaggaagcgtgttgtcttacaagtcatccccgcagcagcccattggatgctttgctgtaaatacttacccggtcagcttggttttgaacctcagagaccatccactgtctttgacacctagaaggtggaaaaaggaaagagattcgagaagtgagagagggtcg

SEQ ID NO: 460 - DNA, 435 bp, Homo sapiens
  misc feature (431): n equals a,t,g, or c
tcgacccacgcgtccgcaagtacaaaaaccttaagtttcatttgtagggccacagatcatagaatttcaaatgacatattacatagtttgtaaatgtatatatttggttgactgaaacttaatcataatttagttcttaaaactatgtggcttgaagtggcaagtagcaagtactgattttaccagattcaagttgatttttaaaagtaaccattggagaaatcgttatacatttgtttgcaggatttttacctcctataactccaccagaaaagttttttctttcccagctgatgctggcacccccacgggaactcttcaaaaagacgcctcgccagattgcactgatggacgttggaaacatgggccagtctgtggamattagtgggctcagttagccttggccggtaaggrggaaycagtgtttgggnattc

SEQ ID NO: 461 - DNA, 654 bp, Homo sapiens
  misc feature (138): n equals a,t,g, or c
gcgwccgagccttyggagctcccagcgtcccctcgggttcaatcctccaggacctgtgtctgatgcctgcatgtgggtacctgggctccatcaggttctagatcggcctccgccctccactttcagggctccaggccnagcttctcatgtctgtggggagggtctccagagccttggtctgtggctgagctgtggaacttgaaggcctctctgcatcttgtcactcgtggcccctgcaccttgggtcatgacctgctttatgtggcaaccctgtgacagctgctaagtcctagaaaacacgtaacaggacgtgaggtgccctctgcgccgtgtgggcgcgtgcggggagacccgggccccaggacgtgaggtgccctctgcgccgtgcgggcgcgtgcggggagacccgggccacatgcgagcggggccccgagacattctgcactcgggaattgcggggattatcaaatcccgcttcagtgggaaacgtgagcgaaacccaaggtgagtggccgcagcctttcgtcacgtgctctcccgcatgtcctaagtragggctcaggctgagctgccgttgccgagagccttgtgtctgcttcgggtgtctgcactgtgagtggctccgtgctrgcgtccgcaccagccgcttggggc

SEQ ID NO: 462 - DNA, 2245 bp, Homo sapiens
aattacccggtcgacccacgcgtccattgtcccaatgtgcccggctcagcctgaggaagcagtcgctcttccaggagccaggtcccgatgtggaggcctagcgccgaggaacagtgctgggcacccgcctggcccgccagacccaccctgccaacatcaagttgttccttctgctccggagacccctggggtgcggccctggccccctccacccctgctgggccagagcgggtgggcagtgtcaaggcccgctgtctcccaggtgcttgctgggactcggggcggctgcacctggctgtcacctgggtgtgctgctgtgaggggtccttgcgtggcccccatccttcccccaatgcagaactccatgggcagggagctggggggacatctcacctcccccatggcacagagccctccacacccctggaccagggcatccgggccctagaaattccacagctcccgtcctggccaccctggaagctcatcaggccaagacccggacagagcttcagaggagtgttgagtgacacctgaggatgcggctgcacacactcagccaagggccgagtctcacctgcggtggggtttcggctctgcctgggggctccatccctttcagccactcgtggccttggggatttctggttgtccccagctgggactgttcacagttgtcacctgcagacctgcctctccctggcctgaggttcaaaggcctcatcggatggtcagtacagtggggtcacctgttgtttctatacaacagcagggaaggggccatggagcttttccctgctgggtgctcctgctttggcccagcccacctttcctggtgctccaagctaggaggctgtggccccagcctgaggagggtgtcctggcctccagtgtgcagcaggggctgtgtgctgggggaggttccagttaggcgatgggatcctgcagtggtctggtggcatttcttggaaccagatttacctgaggagctctgtcctgctccctgtggagggctccagatagctcagaaatgaccagccaatggccttttgtttgggggcctgaggtcaagagagctgagagtattcgctcgactgagcacattcaggaagatcagggcaggcgtgtgggaggtccctcactccacgggacagaggcccctggacagcagaggaaacctacagctctgggtgaggggacacttggctttggtgtttgcactttacagatcctgcggtccacgaggggcctcaggagaggacgtgtcaggacgtggcttcccagccttctgccttgggcagtgggggtgctcctgtctgtccttttcccccacaccctggactgtgcttggctgttggtgcacatggttggcacacggtgggcagagggcagagaatgccactgcttggttattggtcccctttgaccaggaaacccaagaggagacacctcagtcagcagaaaggccacctggctcactggctcattccaggagtgggagagacggcagggtctcctctttgtcctccggcatcaggaaggggatggtgtccactccccactgtggtggctttaggcaaggttcttattgtctgctctgcctcggtttccccatctggaaaatgggggcaggggtcctgacctacctcaggtggaacggtgagcagggaacatgtcggagtccttcagagaatgtgatgtgaggttggatcaacagtgtgggttcctgtcctgtttccccttcctctttggggctgaggaggaggttaaaggccaaatgctgtttcccaacaccccaaagtctgcacacgtctcatgaatgcatcacatttctgtcatatggatattagccattccgaaatctgtgtaatcaacttcacattattcaagttacaaatcactgtgtccatagaaaaactgtgctggtatttgctggacaaagggttgggccccttttatttttacctgccacccagcatctcccccacctgccccttctgggtgacacagccggtaaacggaatcacgtatggttctttctgtgggtctgtggcacagcaggaagagcccsgtgccgccagcaccttgtggaagaccacacatgggtggtcccacagcatgggaccaggctggcctgagggatgcccagttgtaacaatgctgctgtcactgtctcattaaatatacatcctttaaaaaaaaaaaaaaaaaaaaaaaaaaaaaaaaaaaaaaaaaaaaaaaaaaa

SEQ ID NO: 463 - DNA, 1280 bp, Homo sapiens
  misc feature (1016): n equals a,t,g, or c
  misc feature (1137): n equals a,t,g, or c
  misc feature (1242): n equals a,t,g, or c
  misc feature (1254): n equals a,t,g, or c
gcgagcaacgctggagcatcccgctctggtgccgctgcagccggcagagatggttgagctcatgttcccgctgttgctcctccttctgcccttccttctgtatatggctgcgccccaaatcaggaaaatgctgtccagtggggtgtgtacatcaactgttcagcttcctgggaaagtagttgtggtcacaggagctaatacaggtatcgggaaggagacagccaaagagctggctcagagaggagctcgagtatatttagcttgccgggatgtggaaaagggggaattggtggccaaagagatccagaccacgacagggaaccagcaggtgttggtgcggaaactggacctgtctgatactaagtctattcgagctttkgctaagggcttcttagctgaggaaaagcacctccacgtttgatcaacaatgcaggagtgatgatgtgtccgtactcgaagacagcagatggctttgagatgcacataggagtcaaccacttgggtcacttcctcctaacccatctgctgctagagaaactaaaggaatcagccccatcaaggatagtaaatgtgtcttccctcgcacatcacctgggaaggatccacttccataacctgcagggcgagaaattctacaatgcaggcctggcctactgtcacagcaagctagccaacatcctcttcacccaggaactggcccggagactaaaaggctctggcgttacgacgtattctgtacaccctggcacagtccaatctgaactggttcggcactcatctttcatgagatggatgtggtggcttttctcctttttcatcaagactcctcagcagggagcccagaccagcctgcactgtgccttaacagaaggtcttgagattctaagtgggaatcatttcagtgactgtcatgtggcatgggtctctgcccaagctcgtaatgagactatagcaaggcggctgtgggacgtcagttgtgacctgctgggcctcccaatagactaacaggcagtgcnagttggacccaagagaagactgcagcagactacacagtacttcttgtcaaaatgattctccttcaaggttttcaaaacctttagcacaaagagagcaaaaccttccagcctggccaacatnggtgaaaccccacctctactaaaaattgtgtatatctttgtgtgtcttcctgtttatgtgttgccaagggagtattttcacaaagttcaaaacagccacagtaantcagagatggangcaaaccagtgccatccagtctttac

SEQ ID NO: 464 - DNA, 2431 bp, Homo sapiens
gttgtgctgaggccgagggagtcgccattttggatggtgaaccctgaagtcggtgtctgctgcgttcacggcaggattcggttaggaggaacagcacagcatgctgggctctggatttaaagctgagcgcttaagagtgaatttgagattagtcataaatcgccttaaactattggagaaaaagaaaacggaactggcccagaaagcaaggaaggagattgctgactatctggctgctgggaaagatgaacgagctcggatccgtgtggagcacattatccgggaagactacctcgtggaggccatggagatcctggagctgtactgtgacctgctgctggctcggtttggccttatccagtctatgaaggaactagattctggtctggctgaatctgtgtctacattgatctgggctgctcctcgactccagtcagaagtggctgagttgaaaatagttgctgatcagctctgtgccaagtatagcaaggaatatggcaagctatgtaggaccaaccagattggaactgtgaatgacaggctaatgcacaagctgagtgtggaagccccacccaaaatcctggtggagagatacctgattgaaattgcaaagaattacaacgtaccctatgaacctgactctgtggtcatggcagaagctcctcctggggtagagacagatcttattgatgttggattcacagatgatgtgaagaaaggaggccctggaagaggagggagtggtggcttcacagcaccagttggtggacctgatggaacggtgccagatgcccatgcccatgcctatgccatctgcaaatacgcctttctcatatccactgccaaagggaccatcagatttcaatggactgccaatggggacttatcaggcctttcccaatattcatccacctcagataccagcaactcccccatcgtatgaatctgtagatgacattaatgctgataagaatatctcttctgcacagattgttggtcctggacccaagccagaagcctctgcaaagcttccttccagacctgcagataactatgacaactttgtcctaccagagttgccatctgtgccagacacactaccaactgcatctgctggtgccagcacctcagcatctgaagacattgactttgatgatctttcccggaggtttgaagagctgaaaaagaaaacataggtctcttaaaccaggcaactttcacgttttgggagttgagactgagcaatttctccttgtaacaaagaatctccatgaaattctgtttcatctgttaaccgtcactcagcacaacactccctctgggctctcttcctgctcctccagattctgctgctttccagttctctgttgatcctgagactaacaattggagactgaggccagagcaactggctcctggcagctgtgcttgtccgtttcctgtcagagtgatcccaggtttcctcctggcccgtcccatggtccctccacaggagtgtgagaggatgggggaagcactgtgggaagaccaccaaagatggctggacagtgggagagagcacgttgtgaagcatcccagcctcgtgttgaggttccagacttagaaacagacccctctgtacagggggattgtggtgagtgagaatcaaggccaccttgtgtgttttctcactctcgaatgcaagtgggagagggaaaatgactcgggacgccattgtaacggttcctggaagctgggccctctcattggcatatacagtactcctcgctgcagggcactgtcccaccgggatccagttgcaaagtttgtcttgacagttgaaggcctcgcttagttgtactggattctcagggagccctctgtggccttttgctttgcgtgctgtttcccttgtaccagagggcggcaccgtggaaattctgttttccctgtagcatattgtgttggattgcattactggcagagaaaggacaaggtgccattcaagtcctagggtgggcttccagctgccttaatagaagtactcaagtcttttgggtagtgagctggaaagcctacaggaaaagaggggtacctgttttcatttgaaaactttgattcatggaacctttaaaactaatctcagaaaaatttttggtgcccatgcagctgtagttgttcactgctttcctggatggatgggactcttatgtcataacttctgttactcctttggcccatagctaaggtcatccttccccacaggggtggctttgggattggatgatacagcttttgcttctgtgtagtatacctgtacatacttgtttcaggcagcctttctttaatgttttcagttggtttgtattctgtagctcagtagctgctaataaagttaaagatcctgaaaaaaaaaaaaaaaaaaaaaaaaaaaaaaaaaaaaaaaaaaaaa

SEQ ID NO: 465 - DNA, 589 bp, Homo sapiens
agggtaacattcaacaatctatccatctccggagaacttgaagctgttcagaatatggtatctactgttgaatgtgctcttaaacatgtctcagattggttggatgaaacaaataaaggcacaaaaacagagggtgagacagaagtgaagaaagatgaggccggagaaaactattccaaggatcaaggtggtcggacattgtgtggtgtaatgaggattggcctggttgcaaaaggcttgctgattaaagatgatatggacttggagctggttttaatgtgcaaagacaaacccacagagaccctgttaaatacagtcaaagataatcttcctattcrgattcagaaactcacagaagagaaatatcaagtggaacaatgtgtaaatgaggcatctattataattcggaatacaaaagagcccacgctaactttgaaggtgatacttacctcacctctaattagggacgaattggagaagaaggatggagaaaatgtttcgatgaaagatcctccggacttattggayaggcagaaatgcctgaacgccttggcgtctcttcgacatgccaaatggtttcaggcaaggg

SEQ ID NO: 466 - DNA, 1107 bp, Homo sapiens
  misc feature (1099): n equals a,t,g, or c
gcccaccacggcctctctcggcgaggaaactctggcctccgcttcctcctcctccgactcggacaccggcggagcctccccgcccccgcggaagaaaccccgccagcaacaatagcaacagcctgaatgtcaataacggggttcccggcggggcggccgccgcatcctcagccaccgtcgcagctgcctccgccaccaccgccgcctcctcttccttggccaccccagaactgggcagcagcctcaagaagaagaagcggctctcccagtcagatgaggatgtcattaggctaataggacagcacttgaatggcttagggctcaaccagactgttgatctcctcatgcaagagtcaggatgtcgtttagaacatccttctgctaccaaattccgaaatcatgtcatggaaggagactgggataaggcagaaaatgacctgaatgaactaaagcctttagtgcattctcctcatgctattgtggtaagaggcgcacttgaaatctctcaaacgttgttgggaataattgtgaggatgaagtttttgctgctgcagcagaagtacctagaatacctggaggatggcaaggtcctggaggcacttcaagttctacgctgtgaattgacgccgctgaaatacaatacagagcgcattcatgttcttagtgggtatctgatgtgtagccatgcagaagacctacgtgcaaaagcagaatgggaaggcaaagggacagcttcccgatctaaactattggataaacttcagacctatttaccaccatcagtgatgcttcccccacggcgtttacagactctcctgcggcaggcggtggaactacaaagggatcggtgcctatatcacaataccaaacttgataataatctagattctgtgtctctgcttatagaccatgtttgtagtaagaggcagttcccatgkttatacgcagcagatacttacggaagcattgttatgaattttggttcctgttaattcctcctaatgaatggcacttaaacttagcaaccaggatcccaaaagatacaaccagtttattcatattggcaatttttgaatccccggaatacacaccctgcttnaaacttgc

SEQ ID NO: 467 - DNA, 2197 bp, Homo sapiens
  misc feature (846): n equals a,t,g, or c
agcccgggtccacagccgcactcackcgyccgctctccgccaccgccaccactgcggccaccgccaatgaaacgcctcccgctcctagtggttttttccactttgttgaattgttcctatactcaaaattgcaccaagacaccttgtctcccaaatgcaaaatgtgaaatacgcaatggaattgaagcctgctattgcaacatgggattttcaggaaatggtgtcacaatttgtgaagatgataatgaatgtggaaatttaactcagtcctgtggcgaaaatgctaattgcactaacacagaaggaagttattattgtatgtgtgtacctggcttcagatccagcagtaaccaagacaggtttatcactaatgatggraccgtctgtatagaaaatgtgratgcaaactgccatttagataatgtctgtatagctgcaaatattaataaaactttaacaaaaatcagatccataaaagaacctgtggctttgctacaagaagtctatagaaattctgtgacagatctttcaccaacagatataattacatatatagaaatattagctgaatcatcttcattactaggttacaagaacaacactatctcagccaaggacaccctttctaactcaactcttactgaatttgtaaaaaccgtgaataattttgttcaaagggatacatttgtagtttgggacaagttatctgtgaatcataggagaacacatcttacaaaactcatgcacactgttgaacaagctactttaaggatatcccagagcttccaaaagaccacagagtttgatacaaattcaacggatatagctctcaaagtttyctttttngattcatataacatgaaacatattcatcctcatatgaatatggatggagactacataaatatatttccaaagagaaaagctgcatatgattcaaatggcaatgttgcagttgcatttktatattataagagtattggtcctttgctttcatcatctgacaacttcttattgaaacctcaaaattatgataattctgaagaggaggaaagagtcatatcttcagtaatttcagtctcaatgagctcaaacccacccacattatatgaacttgaaaaaataacatttacattaagtcatcgaaaggtcacagataggtataggagtctatgtgcattttggaattactcacctgataccatgaatggcagctggtcttcagagggctgtgagctgacatactcaaatgagacccacacctcatgccgctgtaatcacctgacacattttgcaattttgatgtcctctggtccttccattggtattaaagattataatattcttacaaggatcactcaactaggaataattatttcactgatttgtcttgccatatgcatttttaccttctggttcttcagtgaaattcaaagcaccaggacaacaattcacaaaaatctttgctgtagcctatttcttgctgaacttgtttttcttgttgggatcaatacaaatactaataagctcttctgttcaatcattgccggactgctacactacttctttttagctgcttttgcatggatgtgcattgaaggcatacatctctatctcattgttgtgggtgtcatctacaacaagggatttttgcacaagaatttttatatctttggctatctaagcccagcygtggtagttggattttcggcagcactaggatacagatattatggcacaaccaaagtatgttggcttagcaccgaaaacaactttatttggagttttataggaccagcatgcctaatcattcttgttaatctcttggcttttggagtcatcatatacaaagtttttcgtcacactgcagggttgaaaccagaagttagttgctttgagaacataaggtcttgtgcaagaggagccctcgctcttctgttccttctcggcaccacctggatctttggggttctccatgttgtgcacgcatcagtggttacagcttacctcttcacagtcagcaatgctttccaggggatgttcatttttttattcctgtgtgttttatctagaaagattcaagaagaatattacagattgttcaaaaatgtcccctgttgttttggatgtttaagctgttgaaatgaagtctgccaaatcttgctctaacaaataaaatgttatctaaatgaaaaaa

SEQ ID NO: 468 - DNA, 3611 bp, Homo sapiens
  misc feature (3574): n equals a,t,g, or c
  misc feature (3581): n equals a,t,g, or c
ctggttctgttgttactcctgccgactgcagtgctgttccgtgagcttcttgaatgacatcgtacagtatctccgacgcacagggttcatagtggcgtcatgcacgcagactcctgcaagttcccctaagttcttagaggactgctttgccttttgatctgagagttgcaaagttccataaagaatggcccttgtggataagcacaaagtcaagagacagcgattggacagaatttgtgaaggtatccgcccccagatcatgaacggccccctgcacccccgccccctggtggcgctgctggacggccgcgactgcactgtggagatgcccatcctgaaggacctggccactgtggccttctgtgacgcgcagtcgacgcaggaaatccacgagaaggttctaaacgaagccgtgggcgccatgatgtaccacaccatcaccctcaccagggaggacctggagaagttcaaggccctgagagtgatcgtgcggataggcagtggctatgacaacgtggacatcaaggctgccggcgagctcggaattgccgtgtgcaacatcccgtctgcagccgtggaagagacagcggactctaccatctgccacatcctcaacctgtaccggagaacacgtggctgtaccaggcactgcgggaaggcacgcgggttcagagcgtggagcagatccgcgaggtggcctcgggagcggcccgcatccgtggggagacgctgggcctcattggctttggtcgcacggggcaggcggttgcagttcgagccaaggcctttggattcagcgtcatattttatgacccctacttgcaggatgggatcgagcggtccctgggcgtgcagagggtctacaccctgcaggatttgctgtatcagagcgactgcgtctccttgcactgcaatctcaacgaacataaccaccacctcatcaatgactttaccataaagcagatgaggcagggagcattccttgtgaacgcagcccgtggcggcctggtggacgagaaagccttagcacaagccctcaaggagggcaggatacgaggggcagccctcgacgtgcatgagtcagagcccttcagctttgctcagggtccgttgaaagatgccccgaatctcatctgcactcctcacactgcctggtacagtgagcaggcgtcactggagatgagggaggcagctgccaccgagatccgccgagccatcacaggtcgcatcccagaaagcttaagaaattgtgtgaacaaggaattctttgtcacatcagcgccttggtcagtaatagaccagcaagcaattcatcctgagctcaatggtgccacatacagatatccgccaggcatcgtgggtgtggctccaggaggacttcctgcagccatggaagggatcatccctggaggcatcccagtgactcacaacctcccgacagtggcacatccttcccaagcgccctctcccaaccagcccacaaaacacggggacaatcgagagcaccccaacgagcaatagcagagaatgccagaaggtaatcactcagatacacttgggaccaagagacagtgaaaaatagatgaactaagagaaaaagaatcggatggtctttgtaactgattctggacatatgcatcattgatgttgcagtgttgaaactacaagagctagaaaactgaagatgtcgtctgcttacggaagcgctgaaagactaggatgtgatttattaacgaccaacttctgttattgtgtgttaagtttttcatctgtgcatcaaatcacaaaaagaataaatagagctttttcctttatcagtcccttgggcacagcaggtcctgaacaccctgctctacaatgttgcatcaagagttcaaacaacaaaataaaaaatattaagaggaaatccccatcctgtgacttgagtcccttaagtctacaggggctggtgacctctttttgctaataggaaaatcacattactacaaaatggggagaaaactgtttgcctgtggtagacacctgcacgcataggattgaagacagtacaggctgctgtacagagaagcgcctctcacatctgaactgcatactgagcgggcaagtcggttgtaagttcagtaaaaccctctgatgatgcaaaaaaaaaaaaaaagtattaagtttcacaagctgtttgtactcaaatatattttctcagtttcagatcctctgctattttattgagtggaaagtcttgagctaaaagggttcaagaagaataatgttgcatttccttatgtctcaggaaacactttttatggtaacttgtcagattgtctatgaacaaacccacttttttagacattgataaagtcttcttttcttcacgtgatattttatacaagaacacttcagatgtattagatgtgactgattttaacaaatcctattagatttgtatcaactagttacatgttctattcatagtcttttgtgaatcattgcctttttgtttaaaaagatggcctattttgagcctttgtataggtacattcctgtttttgtgacaaaagaaaaactttaaaattgtcccaaacagaaaaataatggctatcagaagtatgttttgttttagtgtgagttaccgttactgtatttgtttattgtaaaggtggacatttagcgttcagtgcagttttcaataaaaagtaattaaaatttgttaagttctgaaattcaagtacatctcactaatgtaaatgttctctacttgagatgtttaaggcarttgcattgtcaattagccaatttccagctcttgttactacagggttccataaccagactcaagaccgctgacaattaattacctgtgataacaaaaagtttaattgaaaaatcaaaacctcacacaagtccatcattatcacgtcatgccgtccttaagatgcaatggtgggttagtgctaaatcaattcaaaaaaaaacaaagttgctcaacttttagagttctgactttaatctaccccaaagcaaaatgacctggacctggttcaagggagggaagtgaaccttgaaactgttttgccaataacctaacaaacaaaatgatatttacaaagaagtgttgcaaatagtcccatgagttaagagcttgatttaatggatcttctttttaaatagaattaaacctttatactaaaagtatttgcaagtgtcaattaagtccaacaattccaggtatgaaactccctctgagctcttccttatacttcccttcccaattaaaacaaaacaagaaaatcatggtgtcttaaagcctttggttgcctggccttgtctgctcactcattttaaggtggtggccccatcccaactctaccataaaagtgtctattaacacaagctcacatggagagagacggcgctcatagttactgacctattaccccagggaacaaaaaggtagtttaacgtcttcgtaaccactcatcaaagaggcaatgaaatatgcgtgaaaaggaggccaagcgcacacagaatatcttaccttcacgaatatgtgtagaagtctgggacacgatgaacctangagtcanaagcataaaaggcaggtcctgatcatggtc

SEQ ID NO: 469 - DNA, 520 bp, Homo sapiens
gatttgagcgtcagtaagcgagagaaaggacggcgaaaacgagcaaatgtcatgagctcacaacttcattcccttacacacttcagtgacatcagtgctttgacagggggaactgttcatcttgatgaggtgaggttgagatatggttgtagtaggatgtgactttcatgctttcagcaaaatgtatgtggggcttattaccatgaggaacttgggaagggatgctggctctcagaaccacagtgccattccatcacttctccatctgtctccaggatcagaatcctattaagaagcggaagaagatacctcagaaaggtcggaagaaaaaaggtcagtgaactgctgggacttaggtgatcaggtgcaaggtggggagtacaaattgagtctctttggatttgccattctgggtctcaccaagccctgtagtatctcttccatactgggcaataatctccttaggtgggcttttattttttgctttcctgarctggaaatcagcatcwttyacaaattg

SEQ ID NO: 470 - DNA, 879 bp, Homo sapiens
  misc feature (472): n equals a,t,g, or c
gccacgcagcctccaccacctgcccggagcagatggactgctcccccacggacagcagcagtgccagtcctggtgccagcaccacgtctaccccaggggccagccctgccccccgctcccgaaaacccggcgccgtcatcgagagctttgtgaatcacgccccgggggtcttctcagggaccttctctggcacgctacaccccaactgccaagacagcagcgggcggccgcggcgtgacatcggcaccatcctgcagatcctgaacgacctcctgagcgccacccggcactaccagggcatgcccccttcgctggcccagctccgctgccacgcccagtgctccccggcctcaccggcccccgacctggcccccagaactacctcctgcgagaagctcacggctgccccctcagcctccctgctgcagggccagagccagatccgcatgtgcaagcccccgggggaccggcnttcggcagacagaaaaccgcgccacgctgkcaaggtggaacggctgcagctgcttctgcacgagaaacggmtstcgtmgaaaggcccggcgggaccgcgggtgtccgtaccactggtcacccagccgcaaggcggccgcagcgacagcagtagcagcgggggcggcggcacccaagcgcaggcctccggcttgggactcgacttcgaggagctccgtatggaagccagaagtcaaccctgacatcaagtcaaagttcgtggtgggcttaggatctctcggatcggccaaacttcggccctcgcaaccgcagccccagggcggcggcggaattcgcagaaccccggaaaagaaagttgaccagcccttgcaaggagagcgggcaattcccgcagtcaagacaggttgc

SEQ ID NO: 471 - DNA, 2557 bp, Homo sapiens
  misc feature (121): n equals a,t,g, or c
  misc feature (461): n equals a,t,g, or c
gctcgtgccgcgcgggtggaggaatgccatcatggaaggactcctacctgttcacggcttgctccaccaccaatgtctcagtctacctgttcccttcattccatccactctgagtggcaanaaaggcccctgtgtgagcacacaagaactctgagcactcacagtgttcccaacatatcaggggctacttgtartgccttcgcttcccctttcgggtgtccttactcacatagacatgccacctacccttaccgagtgtgctctgtgaatcctccttcagccatagaaatgcagttgcgaagagtattacatgatattagaaactcactgcagaatctttcacagtaccctatgatgagaggacctgatcctgctgctgctccatatagtactcagaaatcatctgttctacctctttatgaaaatacttttcaggagctccaggtaatgaggcgggctgnaaatttgtttagaacacaaatgatggatttagaattggcaatgctgcgtcaaaaccatggtttatcatcatatgactgaggaggagaggtttgaagttgatcagctccagggtttgagaaattcagtccgaatggaacttcaggacctggaactgcagctggaggagcgcctgctgggcctggaggagcagcttcgtgctgtgcgcatgccttcacccttccgctcctccgcactcatgggaatgtgtggcagtagaagcgctgataacttgtcatgcccttctccattgaatgtaatggaaccagtcactgaactgatgcaggagcagtcatacctgaagtctgaattgggcctgggacttggagaaatgggatttgaaattcctcctggagaaagctcagaatctgttttttcccaagcaacatcagaatcatcttctgtatgttctggtccctctcatgctaacagaagaactggagtaccttctactgcctcagtgggcaaatccaaaaccccattagtggcaaggaagaaagtgttccgagcatcggtggctctaacgccaacagctccttctagaacaggctctgtgcagacacctccagatttggaaagttctgaggaagttgatgcagctgaaggagccccagaagttgtaggacctaaatctgaagtggaagaagggcatggaaaactcccatcaatgccagctgctgaggaaatgcataaaaatgtggagcaagatgagttgcagcaagtcatacgggagattaaagagtctattgttggggaaatcagacgggaaattgtaagtggacttttggcagcagtatcttcaagtaaagcgtctaattctaagcaagattatcattaaacagaaattataggttggcatggatcctattagctgtgtaatactggaattatcaatgatatgcactggtggaggtgttatttgtgctttagaagatacttgctgttgagctgggctactgtatacagtgtacaatgtgtatttcttcaaccatatattttaaaaagacgtacatagaaacttaggcactttgctatttcttttctaaactatcaaaaactctagcagtttgaaaagcctaatatttatttgtatgtcaatatttttcatttgattccctattagaattaattttaaaacttgaagacttccagacttatccaacttataaataacatatttcttcagactaacatcttaaaacactgacctctatgaggtatttactgtgcaataactgattcatttttttcagagcttgaagcatccaatgatttttccctccactgctgttaattaatgtcacttccaagaagaaaaactgttctgttgtaaaaaatataattgctcttaattcttggggaggttactaatagcagtaggatagaattttatgaggttacctacaactacttaatgtacttacactgtaagccttgttgctttacccaagacaaatgtaattttatcattgcttatgtagtatttttcttttggaaatgtgccttatgttaaacactatgtacttttactttttgcattgtccagacttctttattagatggagatgtttctttttctgtcttctagactaaatagagtatcatccaaataatggggcctatgacttgaatgaatagaaatgaataagctggtgtttgttttttcaaaatggaagtaatttagatttgttctcctcatacataaaatgattttagttcagttttaaccagtgaaaactttgtttttatgaaaaaaaaggaaaatggtttcccatttggttttatatgtgttaaataaatgtgtaaagtaaccaccaaatgttattagaatttttcttctagcatttataattttttcaactcctattgtgtttctttgtgtgtgatattttaatcaaaagtggttgagttgttaacagtgttctttgaaagaatctctaaaaggcttataaatgtttgaaatatcacacaaaggctgatttctaaaatatatatatattaaaacaataaagtatttattttgcctaaaaaaaaaaaaaaaaaaaaaaaaaaaaaaaaa

SEQ ID NO: 472 - DNA, 467 bp, Homo sapiens
  misc feature (455): n equals a,t,g, or c
  misc feature (466): n equals a,t,g, or c
agttgcttttcaccacctccttttttttcacactgcctcaccttaaaggattacctaaggtggaggtagagaagggtgcgttgctgtctgcagtggacactctctgctgctgggacggctgaagaggggaggaattggtgcagttgcctgtctcctacttggagcagatgctgtctgaccccagcacaccactcctcctcccacagagaccggaacatcaggtctgtcctctggagtttcaggtagcaccacagcggcatcctcgcctamtggtctggtggaaagggaaggggtggtccttgtgtttggacccctcacagctgactcacaggaagtgctaagaagagcttggcactgggcacagcggcttcaggattactgcgccacccaacctgcccttttccacgtaggttttccagtatccttgatagaccatgaaggcttccaagtttgcnaagactcccang

SEQ ID NO: 473 - DNA, 1840 bp, Homo sapiens
ttttttttttttttgcattaacagtaaccccaagaaaggcatcagggttctggagtggttgtttgagtgacacagcacaaggccttgatttcatcatgcttttgctgtggatgtagtgtagcttgctgaacaggtatggaagctgtctttgctgttaagtacttctcccgtttgtttatcaacctgcagctaacaggatgtctgcttttttacaggtttatttcacagagcagtgtacattcttgtcttccaggggaacttcaacatggagttacttttgatccctcagttttaattcagtgtctaaaggtttacaagttcaacttactctattttattcagctctttcacttactctgccatcacttcctacttgaatctgagttttagctactgtagaggtctcagacctttcctttttagtactattagccaggtaaaactttggttcttgtgagtggtagggatgagtttttaggacagtattcaaagcctttttaaaggaaccaactactcaaatgctctacaatgccaaaaatacaatactcctgcaggttttcccaagcaaggccaaaacaatcaaaatctgacagaaaaacacagctgttcagctctggaatctgatgataggctactttttaatgtcaggacatccttctaaacttccacttacagtgtcacatgtaagcatgaaggctggctcgttggtgagccattgctttgtttttaggaagacagttatgaatgccatggacaatctcagtacatgttgtttgttatgattttattcacgctaaaggaatgggtattaaaattaagtgcatataatatagaattcagtttcaagtctgaagttagcgtaaatttagattcttcagactaacataaaacatgattttgagaagttaaataggaagatgccttttttagaagtttagcatatttagtttatctcccaaatcttgcttagaaatcaaatgtatataagagaagttagttacagagctagattgattaactacttctttaatgaagatttgctatgaatttgtttactctttcataccaccttcagatagctagtcagttcagcaggagcagagaccaggttagcacgcggatggggtgtaattcagtgtttttgtgttgtacagcctgagaaatgccagtggcctgacagcagcagacattgcacaaacccagggtttccaagagtgtgcccagtttctcttgaacctccagaattgtcatctgaaccatttctataacaatggcatcttaaatgggggtcatcagaatgtatttcctaatcatattagtgtgggaacaaatcgaaagagatgcttggaagactcagaagactttggagtaaagaaagctagaactgaagctcaaagcttggattctgccgtgccactcacgaatggcgacacagaagacgatgctgacaaaatgcacgttgatagggagtttgctgttgtaacaggtgggagtggacagtttcctgttagctgcaacaacaatccaatggttgaagacaccaaacagcaggagagtggttctgttggaccaaaagaaatagaaatatatactgtgtcagcaatgcagaccccctgtcgttgcaggaatcagtatgcatattatttctaacataagtttttctcagatgttttgcactttgttgtccagtgtctttttaaaaatgttatactataatttgmmtatcttgggcaagtttgtagatacaagaagtgttttgggtatattctgtggacatgaaaaatgtaagtgcaatctttattctgatttgaaaaaaaaaaaaaaaaaaaaaaaaaaaaaa

SEQ ID NO: 474 - DNA, 1258 bp, Homo sapiens
  misc feature (36): n equals a,t,g, or c
  misc feature (528): n equals a,t,g, or c
  misc feature (726): n equals a,t,g, or c
gccaggtgctgggggcgactcggacagcgggacgtnggggtggagtaggatggagtctccctcccgagctgggggtgtgggcctaggaaaggctgcttcgccgctgtgttcggagagctctggatactgcggggcttttccgcggaggagcgcccgccggtaggttggccccgaaccgtgggggcggcgacggccgagtgccaatttgactctgtgcaccaaggtccccgcgccccggaacgggcgacgccgcgcccccatcagagccgcrggcatctgcatctgggaccgacctcctgggctggctgatcaaagaggaagcagcagcaatgtctgctgtggggrctgcaactccatacctgcatcatcctggtgatagtcacagtggccgagtgagtttcttgggggcccagcttcctccagaggtggcagcaatggcccggctactaggggacctagacakgagcacgttcagaaagttgctgaagtttgtggtcagcagcctgcagggggaggactgccgagagntgctgcagcgtcttggggtcagcgccaacctgccggaggagcagctgggtgccctgctggcaggcatgcacacactgctccagcaggccctccgtctgccccccaccagcctgaagcctgacaccttcagggaccagctccaggagctctgcatcccccaagacctggtcggggacttggccagcgtggtatttgggnagccagcggccctccttgattctgtggcccagcagcagggggcctggctgccgcatgttgctgactttcggtggcgggtggatgtagcaatctccaccagtgccctggctcgctccctgcagccgagcgtcctgatgcagctgaagctttcagatgggtcagcataccgctttgaggtccccacagccaagttccaggagctgcggtacagcgtggccctggtcctaaaggagatggcagatctggagaagaggtgtgagcgcagactgcaggactgacccctcacttgaccagtcccattcagatccggcttggacaggcacctgagatggtgccaaagtgcagctgactcttcccacgacagccctgcccttcccatgaggcaggctcttcagtgagtgtttgaacgtaattatgtagttttctgtttaattgaaaaagagagctatgcctttttttctttttggaagtaaagcagctaaaaacawraaaaaaaaaaaaaaaaaaaaaaaaaaaaaaaaaaaaaaaaaaa

SEQ ID NO: 475 - DNA, 4231 bp, Homo sapiens
  misc feature (4136): n equals a,t,g, or c
  misc feature (4167): n equals a,t,g, or c
  misc feature (4184): n equals a,t,g, or c
  misc feature (4223): n equals a,t,g, or c
gcgccgcggaccgggggcgrgggccgggcgcgcacagaccgatctctggaaacatggctacagaacatgttaatggaaatggtactgaagagcccatggatactacttctgcagttatccattcagaaaattttcagacattgcttgatgctggtttaccacagaaagttgctgaaaaactagatgaaatttacgttgcagggctagttgcacatagtgatttagatgaaagagctattgaagctttaaaagaattcaatgaagacggtgcattggcagttcttcaacagtttaaagacagtgatctctctcatgttcagaacaaaagtgcctttttatgtggagtcatgaagacttacaggcagagagaaaaacaagggaccaaagtagcagattctagtaaaggaccagatgaggcaaaaattaaggcactcttggaaagaacaggctacacacttgatgtgaccactggacagaggaagtatggaggaccacctccagattccgtttattcaggtcagcagccttctgttggcactgagatatttgtgggaaagatcccaagagatctatttgaggatgaacttgttccattatttgagaaagctggacctatatgggatcttcgtctaatgatggatccactcactggtctcaatagaggttatgcgtttgtcactttttgtacaaaagaagcagctcaggaggctgttaaactgtataataatcatgaaattcgttctggaaaacatattggtgtctgcatctcagttgccaacaataggctttttgtgggctctattcctaagagtaaaaccaaggaacagattcttgaagaatttagcaaagtaacagagggtcttacagacgtcattttataccaccaaccggatgacaagaaaaaaaacagaggcttttgctttcttgaatatgaagatcacaaaacagctgcccaggcaaggcgtaggttaatgagtggtaaagtcaaggtctgggggaatgttggaactgttgaatgggctgatcctatagaagatcctgatcctgaggttatggcaaaggtaaaagtgctgtttgtacgcaaccttgccaatactgtaacagaagagattttagaaaaggcatttagtcagtttgggaaactggaacgagtgaagaagttaaaagattatgcgttcattcattttgatgagcgagatggtgctgtcaaggctatggaagaaatgaatggcaaagacttggagggagaaaatattgaaattgtttttgccaagccaccagatcagaaaaggaaagaaagaaaagctcagaggcaagcagcaaaaaatcaaatgtatgacgattactactattatggtccacctcatatgccccctccaacaagaggtcgagggcgtggaggtagaggtggttatggatatcctccagattattatggatatgaagattattatgattattatggttatgattaccataactatcgtggtggatatgaagatccatactatggttatgaagattttcaagttggagctagaggaaggggtggtagaggagcaaggggtgctgctccatccagaggtcgtggggctgctcctccccgcggtagagccggttattcacagagaggaggtcctggatcagcaagaggcgttcgaggtgcgagaggaggtgcccaacaacaaagaggccgcgggcagggaaaaggggtcgaggccggtcctgacctgttacaatgaagactgacttgctatgtgggattacaccagaagcttgcagtggagtaatggtaaggaaatcaagcaaccttaaatatgtcggctgtataggagcatattctattgcagaagaccttcctatgaagatcatggaatcaaatacgggacattgaactaatacttggactttgatatgaatttctttaacaattttctctgcagtgcaagttattaaactaaagctactctattttcaaaatgtgttccaacagaaatccttcataactcctagcatggtatcttaataaagaataaagttcttttaaaaatctgctctaagtagatttttccccttttttaaattaaggatcccaacagtggtattttgaaatattctcttgaatttgtgcatttaaattttattgcagtggtatagatgaatgccactgatggtatccttaaattttatttctgctcaccaaggttaatcatgattgtctatatctytyttatagtgatcacttttgaattgtgttcagatatgcagtttcaggtgtaatcatcagagctggttagtcaggcattccagatagtggttcttttcagaacctttttaaaagggttggttaactacctcagtagcagaggattgaactataccctgtctgtactgtacatagaaaatccttgcttttgtcgtattttgtggctgaaaaagcagccttgcttcttcagatattgtagttatttggatgtataatagtttagcaagatgttacttttgtaagacatcagatgttcaaaaaagtgcatccgaacttgtactaaatactgcagtgtccctttataaaaagtcagactaaaactgacaattgtacagcgamsctgacatttggatattttgaagttttttcataaatcatagaaattagtatatggctgtagtttagctttttaggtaaaaggtatgtttcattagtgcatttcttcctgctgatcactgtaaacatgtgaatcagctttccatttcttatgcaggtcatgataacttgtagagtagagtacaatcatttgtgctatgtttttaattttctaaagcaccttgatgacagtgagtgtccagtggtgaagcatcctctattgaaccaccctcaaaaatttttttgccaagtcctaagttgatagcttaaagtaaaaagtgaaaattatagtttcattaggacttggtgtaaagaaatcccctccccccttccccaaagggatactgcagttatatcacatacccaataggcaccacgatgaagatcagagcttatacttaattaaggttttatacacaccagttccccagtaaatgcaaatttaacaagaaaatcagacatgtcatatgttcaaaatgctcatggcaaacaatcattttgcattcctgcaaataaaattgttttatactgtaagctggaggcgagtgtaacttatttttgtaataaagtttttattttttttatgtgtcattaatataaatgtgtgttagtgtagaaatcttctggtttaaaaacttagaattgcacacatttcagtatgtttatttgtacttacataattttagaatagtggttgccaatagcctgtatgtttcacattaattggttttttgttatctaaataaatcattttagtatgttgtatgtcagttactgggatagctgggacatagagtgtaatttaaaatttgtcaataagtattcattggaatatatgtaaatgtgccttgccggttattgaaacttatctacaaaatgagtatggggtgacaaaaattagttcctggtgcttaatgaaactttctgccactgattttatatattaccccgtgcttttttaaagtacatctctctcaaaacttagtgtaagtttgagggctacacaaaacatttacatttcattctaacataatgaatataataggttgtggaragtgggtaaactaaatgtagccttcagtaaaattgaatctcagtgtaatccttggtgctggcatttctcagttccgaggagttaaatgatcccatctaagaggtcattgccatgcctattggcactttactgtcatagcatttttaagggacactgtcaaggtgtttaagttctcagaattacttgttgggattttaggacaggtttgtttacttaaagtaagaactgcattgtcaaagttgaaagaggaacacttttgtgagttcacaaatgtgttcttaagaaaacattaaaatatggagctctgggttttcaagactatttggcattcttaatttgggggacttggggagggaaactgataaaaagaaattggaagaatggatggttatacttaaagaaggggtaatgtaaacatggtggatggaaatatataccccncccagtggaaattacctggaccatggttccntttgaatggaccttggnattccagcccatgataattaccttttaaaaattaaatanccattggc

SEQ ID NO: 476 - DNA, 691 bp, Homo sapiens
  misc feature (689): n equals a,t,g, or c
  misc feature (691): n equals a,t,g, or c
tcgacccacgcgtccgcccacgcgtccgaaccaggacagggaggctggccggaggttcctgcagagggagcgtcaaggccctgtgctgctgtccctgggggccagaggggttgcccagcatgcccactggcaggagagagggaactgacccacttgctcctaccagcttctgaaggtgacactgagccccaggtgacgccgcaccaccaaagaaggtgcttgtgtttgtcagacaaatacagccaggcctgccaccccttaggctccaaagtccggaggtgcagaaagccaggaccaagagacaggcagctcaccagggtggacaaatcgccagagatgtggtgcattgtcctgttttcacttttggcatgggtttatgctgagcctaccatgtatggggagatcctgtcccctaactatcctcaggcatatcccagtgaggtagagaaatcttgggacatagaagttcctgaagggtatgggattcacctctacttcacccatctggacattgagctgtcagagaactgtgcgtatgactcagtgcagataatctcaggagacactgaagaagggaggctctgtkgacaraggagcagtaacaatcccamtctccaattgtggaagagttccaagtcccatacaacaaactccaagggtggaaatccccttttttttttaaaaaaaangn

SEQ ID NO: 477 - DNA, 1418 bp, Homo sapiens
  misc feature (93): n equals a,t,g, or c
  misc feature (396): n equals a,t,g, or c
  misc feature (432): n equals a,t,g, or c
  misc feature (1127): n equals a,t,g, or c
  misc feature (1143): n equals a,t,g, or c
  misc feature (1289): n equals a,t,g, or c
  misc feature (1319): n equals a,t,g, or c
  misc feature (1399): n equals a,t,g, or c
  misc feature (1400): n equals a,t,g, or c
aggcacgctggagaagctggtgaatggcccctgcgtgtccactggaccaggcatgagggaggcaaacaggcagaggcgggcgggccctggcancccagtggcctgactgctgccccacaggtctccgaagccaaggcccactccgcgacgtccaggacttctggatcagcctcccagggacactgtgcagtgagaagatggccctgagcactgccagtgatgaccgctgctggaacgggatggccagaggccggtkacctccccgaggtcatgggtgacggcctggccaaccagatcaacaaccccgaggtggaggtggacatcaccaagccggacatgaccatccggcagcagatcatgcagctgaagatcatgaccaaccggctgcgcagcctnacaacggcaacgacgtggacttccaggacgccaktnacgacggcagcggctcgggcagcggtgatggctgtctggatgacctctgcrgccggaaggtcagcaggaagagctccagctcccggacgcccttgacccatgccctcccaggcctgtcagagcaggaaggacagaagacctcggctgccagctgcccccagcccccgaccttcctcctgcccctcctcctcttcctggcccttacagtagccaggccccggtggcggtaactgccccaaggccccagggacagaggccaaggactgactttgccaaaaatacaacacagacgatatttaattcacctcagcctggagaggcctggggtgggacagggagggccggcggctctgagcaggggcaggcgcagaggtcccagccccaggcctggcctcgcctgcctttctgccttttaattttgtatgaggtcctcaggtcagctgggagccagtgtgcccaaaagccatgtatttcagggacctcaggggcacctccggctgcctagccctccccccagctccctgcaccgccgcagaagcagcccctcgaggcctacagaggaggcctcaaagcaacccgctggagcccacagcgagcctgtgccttcctccccgcctcctcccactgggactcccagcagagcccaccagccagccctggcccaccccccagcctccagagaagccccgcacggntgtctgggtgtccgcnatccagggtctggmagarcytctgagatgatgcatgatgcccttccctcagcgcaggcttgaagaagcccggccccaccttccttgcgcccttgagggggccccaagcggtctgcaaggggtggacgcctgagaacaggaaccaantgcttgaaggaagtctgaaggacttggccntcccacaagaaccttgcagtgaagggggccccttccattgccgcaagaatgaagggggccaacttggaccccaaccttgnngctttctggcttggaagg

SEQ ID NO: 478 - DNA, 1237 bp, Homo sapiens
  misc feature (1232): n equals a,t,g, or c
  misc feature (1236): n equals a,t,g, or c
gcttgcccttctcaaacatggccgccacggcgcctctggaagggaaccgctctgggccccgcctttgatctcgttggtggggctgggggatgagagctgcaccgcgcgggacaagtcgccggcggcgcccgacggagcagaasagagagcatggagctggagaggatcgtcagtgcagccctccttgcctttgtccagacacacctcccggaggccgacctcagtggcttggatgaggtcatcttctcctatgtgcttggggtcctggaggacctgggcccctcgggccatcagaggagaacttcgatatggaggctttcactgagatgatggaggcctatgtgcctggcttcgcccacatccccaggggcacaataggggacatgatgcagaagctctcagggcagctgagcgatgccaggaacaaagagaacctgcaaccgcagagctctggtgtccaaggtcaggtgcccatctccccagagcccctgcagcggcccgaaatgctcaaagaagagactaggtcttcggctgctgctgctgcagacacccaagatgaggcaactggcgctgaggaggagcttctgccaggggtggatgtactcctggaggtgttccctacctgttcggtggagcaggcccagtgggtgctggccaaagctcggggggacttggaagaagctgtgcagatgctggtagagggaaaggaagaggggcctgcagcctgggagggccccaaccaggacctgcccagacgcctcagaggcccccaaaaggatgagctgaagtccttcatcctgcagaagtacatgatggtggatagcgcagaggatcagaagattcaccggcccatggctcccaaggaggcccccaagaagctgatccgatacatcgacaaccaggtagtgagcaccaaaggggagcgattcaaagatgtgcggaaccctgaggccgaggagatgaaggccacatacatcaacctcaagccagccagaaagtaccgcttccattgaggcactcgccggactctgcccgagccttctaggctcagatcccagagggatgcaggagccctatacccctacacaggggccccctaactcctgtcccccttctctactcctttgctccatagtgttaacctactctcggagctgcctccatgggcacagtaaaggtggcccaaggaaaaaaaaaaaaaaaaaaaaaaaaaaaaaaaatttggggggggncccng

SEQ ID NO: 479 - DNA, 1098 bp, Homo sapiens
gtttggtggagcccgcgatggccgaacctgcgtctgtcgcggctgaatctctcgcgggcagcagggcgcgcgctgcacgcacagtactaggtcaggtggtgctcccgggtgaggagctgctcctgccggaacaggaggacgcggaaggccctgggggtgcagtggagcgaccgttgagcctgaatgctagagcgtgctcgcgggtgcgcgttgtatgcggtccgggccttcggcgctgtggggaccgcctgctggtcaccaagtgcggccgcctccgtcacaaggagcccggcagtggcagcggcggcggtgtttactgggtggactctcagcagaagcggtatgttccagtaaaaggagaccatgtgattggcatagtgacagctaaatctggagatatattcaaagttgatgttggagggagtgagccagcttctttgtcttacttgtcatttgaaggtgcaactaaaagaaacagaccaaatgtgcaggttggagatctcatctatggccartttgtggttgctaataaagacatggaaccagagatggtctgtattgacagctgtggacgagccaatggaatgggtgtcattggacaggatggtctgctttttaaagtgactctgggcttaattagaaagctattagctccagattgtgaaatcatacaggaagtgggaaaactctatccactggagatagtatttggaatgaatggaagaatatgggttaaggcaaaaaccatccagcagactttaattttggcaaacattttagaagcttgtgaacacatgacgtcagatcaaagaaaacagatcttctccagattggcagaaagttgatataggtggacttttttacaggtcagttgaggcaaaaaactatgggttttttcaggtgaacctcccccatttaaatactcagaagataaggtgtgaatgtatgtattattagagtccgaaagtatttttataagttactggttttcacccacgcttttgtgggagagaaaatcattgcaaaatcattttttttgttcggtacaataaagtttactaaaaaacaaaaaaaaraaaaaaaaaaaaatggcggccg

SEQ ID NO: 480 - DNA, 684 bp, Homo sapiens
  misc feature (5): n equals a,t,g, or c
gtagnatccggggaggtcggggccgcggtgaactccagttcaccaggacaggaagtgacagcggaacgccggaaaccgcagatccacggaggtcaggsccgcggagagctgtagttccccggaaccggaagtgatggcggacytccggaaaccgtagattccgggcggtcggagccgccgggagctgtagttctcccgcggctcagagaagtaggcagagagcggacctggcggccgggcagcatggcggggctggagctcttgtcggaccagggctaccgggtggacgggcggcgcgccggggagctgcgcaagatccaggcgcggatgggcgtgttcgcgcaggctgacggctcggcctacattgagcagggcaacaccaaggcactggctgtggtctacggcccgcacgaggcgagtgggckcscgggatggggaatcgtgtggccgtgggagctgcggggcagccgggctgagcgctggctcggggacttgaggggcaaggccgcgcgcctcatctacacagcgatgctcagcaccgcatctcactcggagtaaacgcaagtccttagtgtgctgcgcggtggtcctgcctttctcatcggcctctgtccctgcgccctccttcctctttgcggctcttcaacgtgctaggcactcccccactcgctccctctcctttcc

SEQ ID NO: 481 - DNA, 2995 bp, Homo sapiens
  misc feature (1760): n equals a,t,g, or c
ggcttgcctataaactgtatctgtgaaagactgaatatcataggtgagatcaacactgatacagtttataggcaagcaataaacagcaagatgtttgaggtggatatgaaaattgctgcaatgcatgtaaaaagaaagcaactccatcaactactacctaatcatgtgcttcagaaaaagaaaaagcattcaacagaaggtgtcaaattgacagctctcaatgacagcagcctcgacttgtctatggacagtgataacagcatgtctgtgccttcacctactagtgctacgaagaccagtccattgaacagttctggcagctctcagggcagaaacagtcctgctccagctgtaacagcagcatctgtgaccaacatacaggctactgaagtttctgtgccacaagtaaattccagtgaaagctcagggggtacatcgagtgaaagcattcctcaaactgccacacaaccagccatttctccaccaccaaagcctacggtctccagagttgtttcttcaacacgtctggtaaacccaccacctagatcttcaggaaatgcagcaacttcaggaaatgcagcaacaaaaatacctactcctatagtaggagtcaagaggacatcctcacctcataaagaagagagtcccaagaaaaccaaaacagaagaggatgaaacaagtgaagatgctaactgtcttgctttgagtggacatgataaaacagaagcaaaggaacaacttgatacagagacaagtacaactcaatcagaaactattcagacagcggcttctctgttggcctctcagaaaacatccagtacagacctttctgatatccctgctctccctgcaaatcctattcctgttatcaagaattcaataaaactgagattgaatcggtaaaaacaacctcaggggtccataaacaatatctgccaactcaacctgttgtcttcaaatgctaaaaaaggagaatggagggtacaagactagacatgactgaaatggatttgggttttttggtgacctcccttactgggctaatcagcacttgatcggaagtccaggttagtatgtgaagccaggagtactattattattgtgttagcaacagttgcattaactatttcaaaaattactgcctttaaaaaaaacaacctcaagctatatttgtattcataattgacatctggattgggtttatgtttgatgcattgtttggaaaatttgcaatacaaactggcataagaattacttattctgatgatgcacttttatgtatttttcattagaaagtagaactaattttagattttcagcttgatggattttcagtttttcctgaagaattttctttaccattagtcttcaaattggatactgttgtgcagtggtgtactgttatacttcagagaaagggtaagagtacatctagttcagttcctatgaggtagctgtaacccttaaaaatgaaacgtcaactctagggtacatttgacattgaaagaatagttaggaaataacttggttttgatagggtcatgattaagaaatgatatattggttttatttatggaattgttttatagtgcatacaaatcagcgatcagccagcaaatatttttctttgagcttgtgaaagctctgtgttcttttgccttcaatctgttgtcttcaaaacaaacaaacaaaaaaagcttcttgcgcctttccctcccctgttttcytcctttttctttttgcttgtatgcacaaggtangacttacttcgtaagaaacaaaatgccagtattttcttaagccatgatgtgaaaccaatgaccctgtgaccacatggcacagaacactaaattttggtcccatggctgaaacttgagggtgactaaaagtaatgcctgtgaaacatgatatctatctgggatggccatttgatctctaaaaggaattttgtacactccacagaactcctatctatagtaaaattgattttcagttttaaatgtgggcaaaaaggcattttctccaagattttaaaactaattcttatttttaaatggtttaccaaaatttgtcagtacattttacgtgtagaagcattttaaaaatcatttctagcaagcacttgacatctagtcagctctctactcctttattttgttttatcaaaagattaagagctcctttctttgaataaaataatttctcataattaagcagtagaagatctatcttcacaaagtatgagggatgccagatgttgataaacttactctttctgaatctggacaaagtcgacttaacagatttttctgatgagcatgttttatgaatcctccattgtgctccattctatcacatgtgcatttttcatgttaaactgcaattacttaatctcttcccctatccttctaaattaattttctgaagttggagtgtagtcttttcccccttaggctatgcattaatcgaagctttcttttcaccatgactttataatgtctagtaaacaatatttctacttcccacatctttgctttacacagtcaccttgcccttccttccaccaccgaagaaaaaagatggtcatactaacaggtgaaatgtacaaggtgtctgtgtgttttgtgtagcttcagagttagattgaaattaccaggcacagatttagtcttgtcattttgtttacacattggggaaaacaattcagtttattaaacgtttcatgtaactgcacccaagttttgccaagctggaaacttggaccttttctgtgtagtgactttttaattatagttttcataacctggagatcagactgttgctttcgcatgatgtatgtagtgtctcatgactggagtttgctttgttttatagtatctgtactccttgtatttttcaagagctattttgtaaacagatgatgtatttctccattgaaaacacaataaaaaaaaaacagcacaaaaaaaaaaaaaaaaaaaaaaaaaaaaaaaaa

SEQ ID NO: 482 - DNA, 1248 bp, Homo sapiens
gcagacttaatgtcaagaatgaaaaaaaaatagttcatcaggatgtaacctgagattcacctctgcatctttaccaaaagaatgcacgcttgaagaatgtggaattcctgcttgtaaaccgtatacactgtgggacgagacaccaatgtcttggttacatcaaaagaaggctagcaatgtgtgccagaagactcgggaggaccagggaagcagtgaaaatgatgagagatttaatgaaggagttcccccttctgagtatgttcaatatccatgaaaaccttttagaagcccttctggaactacaagcatatgctgatgttcaggcagtcttagcaaagtatgatgatataagcttaccaaagtcagcaacaatatgctacacagctgctttgctcaaagcaagagctgtctctgacaaattctctyctgaggctgcatctcggcgggggctgagcacagcagagatgaatgcagtagaggccattcatagagctgtggaattcaatcctcatgtgccaaaatacctactagaaatgaaaagcttaatcctacccccagaacatatyctgaagagaggrgacagkgaagcaatagcatatgcattctttcatcttgcacactggaagagagtggaaggggctttgaatcttttgcattgtacgtgggaaggcacttttcggatgatcccttatcccttggaaaaggggcacctattttatccttacccaatctgtacagaaacagcagaccgagagctgcttccatctttccatgaagtctcagtttacccaaagaaggagcttcccttctttattctctttactgctggattatgttccttcacagccatgctggccctcctgacacatcagttcccggaacttatgggggtcttcgcaaaagctttcctcagcactttgtttgcccccttaaactttgtcatggagaaagtggagagcatcctcccatccagtctgtggcaccagctaacacggatctgagagaagccctgtcctccactcacctcacccgccgctgccaccatctcctctgtgccaactccttgtggaccgcaagaaagcatgactttgaaaaagggaagccattccgagattttaaaatgttcatggactattccatattaaaagctgtttttgttgtacaaaattcactgatgttcagttctattttattttgccttcagaaaagaagaaagtcaaaaataaaacttttgtgtattacagcaaa

SEQ ID NO: 483 - DNA, 1862 bp, Homo sapiens
  misc feature (124): n equals a,t,g, or c
gcagcgaccgctttggtcggctgtgtagactgttgggtaggctgcgtgctagcttcggcgcggatccctgggcgtccgtacgtcggagtccttcgtcctccagggtccctgttctttgcgccancgggaaccactatctctgcactcctggggttttgttacatggctgctttcctcaaaatgagtgttagtgtcaatttcttcagacctttcaccaggtttttggtgccatttacccttcataggaagagaaataacttaacaattttgcagagatacatgtcttccaaaataccagctgttacttatcctaaaaatgagagtacacccccttctgaagagctagagttggataagtggaaaactaccatgaaatctagtgtgcaagaagaatgtgtttcaacaatctcaagcagtaaggatgaagatcctctagctgccaccagagagttcattgagatgtggagattgcttggcagagaagtaccagaacacatcactgaagaagagctcaaaacccttatggaatgtgtttctaacacagcaaaaaaaaaatatttaaaatatttatatacgaaggaaaaagtgaaaaaagctaggcaaataaaaaaggaaatgaaagcagcagcaagggaagaagcaaaaaatatcaagctgctagaaaccactgaggaagataaacagaaaaactttctatttttacgactttgggataggaatatggacatagcaatgggctggaagggtgcccaggccatgcagtttggacaacctttggtttttgacatggcttacgaaaattatatgaaacgaaaagaattgcagaatactgtttcccagcttttagaaagtgaaggatggaacagaagaaatgttgatcctttccatatttatttctgcaatctaaaaatagatggtgctttgccagagagttagttaaacggtatcaagaaaaatgggacaaattgcttttaacatcaacagaaaagtctcatgtagatttatttccaaaggacagtattatctatttaactgcagattctcccaatgttatgactactttcaggcatgacaaagtttatgtaattgggtcttttgttgataagagtatgcagccaggcacatccctagccaaggcaaaacggctgaacctggcaactgaatgccttccattagataaatatttacaatgggaaattggtaacaaaaatctcaccttagatcaaatgatacgtattttgttatgtctgaaaaacaatggtaattggcaagaggctctgcaattcgttcccaagagaaaacatactggttttctggagatttctcagcattctcaagagtttatcaacagactaaagaaggcaaagacttaattcattttcaaaaggttctctgaatgtgcacagaacacgtggctcaaatgagaacatttgatggcttaaaaagtaaatgcgttagaaatacagttctgttaatgtatttcttcccaaacaattcatttttctcttctaaaggtagtctttcccaactgactgtagggttgtgtcttttcccaattaaatatctgcagaactttgggattatactttgtttactgtagaaagataataaaaagagttgtccaagattgttgaacagaataatctttatcccagttaaatagttgtaccattggtagacttttttatggaggttcctagagggtggtgccctggggtgggcttggaagctctgcaccccttcccccatagctttccccgtgcatctctttgtctgtatgttttgtaatatcttttacagtaaactggtaaatgtgtttccttcaaaaaaaaaaaaaaaaaaaaaaaaaaaaaaaaaaaaaa

SEQ ID NO: 484 - DNA, 1664 bp, Homo sapiens
tttaatgtgcaggctattcaagttcaatagtaaaagctcaaaaatgaatgttctactccatgctgaaggagctgaaastgccttcttcatattttgcactttctggtagttcccctgttttttctaattccctaaaattgtgtgggtggagtggagccctgcagttggggggtaacatggaccactgattttgccctttgaccctgcacaatgacctttgcatcagccaaactcattgccatgacaactctttgtactgtgtccgtgccacagatctgttggtcacattgttaatagtaaaggggacaagttggagacggtcaatttttacattttttgttgcaattttttcttcaatggttgtaagtagttttttttttttttaataataaaagggttcactagttaatactctagaaatatctgtgtgttgcaattcaaatgtatgttgagattgtgaaaagcgcttcagtgccactagcttaccggtacactagactaagcccttgatgacttattgcatgatacagtaccaggaacaacaggtggcctaaatacatgaaaagcagtgtaagctagtgacactaaagccagtcttgtattactgtatttttgacagaatggttttgaaaactgtgctacagggactgatgtggcaaatatatctctttatgcagaaggaagtctttttttttcttttttttttttttaagaagtatggctttttatgcatccttcatcgagggcattgaagttgcatggactgataaaagttgatgcaaaacaagaaagaaacaaacaaaaaaaaaaaaccagcaaaatgtttaccaaaaaactcaaacaaatgagcagtgcctgttcaatttcacagtctctgttgagttcagttgtaaatatgtttcaaatgacattttcttggaaaaaaaatctctacaacattgtagaatgtgaggggtaactacatcccaggcataggtttctcaaagctgcagtagattatgtcttcatcaagctgttaatttgtgcttatatcatatagaacttttagcatcctgggaagagctgcccccacctcaatgatatttctctgagaacaacttttgtaggactgtgtgtttctttagatacatttagtacaactgtaggtgacgagtagtcagttattgcttgctagctacacaccagggttgatccattttaaaacttttggcattttgtcctcatgggccataaatacagaaccttgtattttaattaaatttttttacaaaaggaggcacatgcacaatctccatgtaacaaacctttagcagtaggatgtattatacgacagttacttaatttctagagttcaggcctctgggatcaaccccagactgggccagaatgttagtgaaggttttattgtgcccggttggaggataacgttctttgggtactttttgtgggttgcaaatgaactcaattgccacaagttttaaactggtgtaaatcaagcttgacttaatgtgattgttactgttatatccagcctatactgctagcagctgctcatactgcagtcaattactggaagcggatatatttcctatgcaaaaactgtttaaacaataaaatgagctatgctacagaaaaaaaaaaaaaaaaaaaaaaaaaaaaaaaaa

SEQ ID NO: 485 - DNA, 969 bp, Homo sapiens
gggggccgcggggctgcggggcggggaaagccgagggcgtgggtgggcgctccgggtcagcagagacggctgtccgcccgctgggcgccgctgcggatttggtaaatgggaggtgacgctggtgaccgagagccggggcccgctgccaggagcctgggcgagggccaggctggctttgctacagctgaccactccggtcaggagagagagactgagaaggctatggatcgactagcccgtggaacacagagcattcctaatgacagtcctgcccggggtgagggcacccattctgaagaggaaggctttgccatggatgaggaggactctgatggagaactgaatacctgggagctgtcagaagggacaaactgtccacccaaggaacagcctggcgatctttttaatgaggactgggactcggagttgaaagcagatcaagggaatccatatgatgctgacgacatccaggagagcatttctcaagagcttaaaccttgggtgtgctgtgccccacaaggagacatgatctatgaccccagctggcaccatccgcctccactgataccctattattccaagatggtctttgaaacaggacagtttgacgatgctgaagattgagtgtggagctttctgccttgtaggtgggcgggcctccacgtcaagatctcttttcctgtcttggaggtgaaaagtcatatctgagaaaatgtttgcagtgacccctagtctggggtacacagaccagtgttccttattgacagtgttcaataaggccccgtcattctcgccagtctgttgttgttcttaatgggctcctccttgaaatgtgtgtgtgtttgtgtcaagaggagttgtgttctttgtaaataaaggttaaaaagagaaaaaaaaaaaaaaaaaaaatttttgccccaaaggggggcggttaaaagataacggcggcggggatttgtgagaatatgc

SEQ ID NO: 486 - DNA, 2572 bp, Homo sapiens
  misc feature (823): n equals a,t,g, or c
tgcaagaagcagcgactgcagcagcagcagcagcagcggcggtggcagcagcagcagcagcggcggcagcagcagcagcagcggaggcaccggtggcagcagcagcatcaccagcaacaacaacaamaaaaaatcctcatcaaatcctcacctaagctttcagtgtatccagatccacatcttcactcaagccaggagagggaaagaggaaaggggggcaggaaaaaaaaaaaacccaacaacttagcggaaacttctcagagaatgctccaaaactcagcagtgcttctggtgctggtgatcagtgcttctgcaacccatgaggcggagcagaatgactctgtgagccccaggaaatcccgagtggcggctcaaaactcagctgaagtggttcgttgcctcaacagtgctctacaggtcggctgcggggcttttgcatgcctggaaaactccacctgtgacacagatgggatgtatgacatctgtaaatccttcttgtacagcgctgctaaatttgacactcagggaaaagcattcgtcaaagagagcttaaaatgcatcgccaacggggtcacctccaaggtcttcctcgccattcggaggtgctccactttccaaaggatgattgctgaggtgcaggaagagtgctacagcaagctgaatgtgtgcagcatcgccaagcggaaccctgaagccatcactgaggtcgtccagctgcccaatcacttctccaacagatactataacagacttgtccgaagcctgctggaatgtgatgaagacacagtcagcacaatcagagacagcctgatggagraaattngggcctaacatggccagcctcttccacatcctgcagacagaccactgtgcccaaacacacccacgagctgacttcaacaggagacgcaccaatgagccgcagaagctgaaagtcctcctcaggaacctccgaggtgaggaggactctccctcccacatcaaacgcacatcccatgagagtgcataaccagggagaggttattcacaacctcaccaaactagtatcattttaggggtgttgacacaccarttttgagtgtactgtgcctggtttgatttttttaaagtagttcctattttctatcccccttaaagaaaattgcatgaaactaggcttctgtaatcaatatcccaacattctgcaatggcagcattcccaccaacaaaatccatgtgaccattctgcctctcctcaggagaaagtaccctcttttaccaacttcctctgccatgtttttcccctgctcccctgagaccacccccaaacacaaaacattcatgtaactctccagccattgtaatttgaagatgtggatccctttagaacggttgccccagtagagttagctgataaggaaactttatttaaatgcatgtcttaaatgctcataaagatgttaaatggaattcgtgttatgaatctgtgctggccatggacgaatatgaatgtcacatttgaattcttgatctctaatgagctagtgtcttatggtcttgatcctccaatgtctaattttctttccgacacatttaccaaattgcttgagcctggctgtccaaccagactttgagcctgcatcttcttgcatctaatgaaaaacaaaaagctaacatctttacgtactgtaactgctcagagctttaaaagtatctttaacaattgtcttaaaaccagagaatcttaaggtctaactgtggaatataaatagctgaaaactaatgtactgtacataaattccagaggactctgcttaaacaaagcagtatataataactttattgcatatagatttagttttgtaacttagctttatttttcttttcctgggaatggaataactatctcacttccagatatccacataaatgctccttgtggccttttttataactaagggggtagaagtagttttaattcaacatcaaaacttaagatgggcctgtatgagacaggaaaaaccaacaggtttatctgaaggaccccaggtaagatgttaatctcccagcccacctcaacccagaggctactcttgacttagacctatactgaaagatctctgtcacatccaactggraattccaggaaccaaaaagagcatccctatgggcttggaccacttacagtgtgataaggcctactatacattaggaagtggcagttctttactcgtcccctttcatcggtgcctggtactctggcaaatgatgatggggtgggagactttccattaaatcaatcaggaatgagtcaatcagcctttaggtctttagtccgggggacttggggctgagagagtataaataaccctggctgtccagccttaatagacttctcttacattttcgtcctgtagcacgctgcctgccaaagtagtcctggcagctggaccatctctgtaggaagtctattaaggctggacagcccagggttatttatactctcccagcccacctcaacccagaggctactcttgacttagacctatactgaaagatctctgtcacatccaactggaaattccaggaacca

SEQ ID NO: 487 - DNA, 1451 bp, Homo sapiens
  misc feature (1256): n equals a,t,g, or c
tgtttttattttatattattattatagaaggtggtaccattatcaattatgtgaagggacatgcagacaccccagcttttgagggtgctgggggtaggactgaggcagccccactgggaaccagactgcagcctggcccatggctgttttcccaaggatcagttcctggagggaagggctctggccctgactccgctgtgtcccgagcacacgtgctgaccgcagcccgccgccctgtagttcttggctgggtctggaggtgtctgtggagcaccctgccctcaccacaggagcgtgagccacttctgcagtccacgctgaacatgggaaacaacctgaaaagcaggcaggcctcccggtcagggagcctctgctgtgctggcttcccatgaccacctcctcctgctgaaatattactgcttgaatctggagcagattgcgggtttataaaactgctttttatctgagaacaaacgggtttggaaattagtcgtcttttttccccactcccagagctgctcaartcattccaccggccccctcggcttgggacagggtagtgtaactcccgatcccagggcctagccctgacacaggtggcttcccgtatcccggtgggaaaacgccctgccaccagcgggcttgagctggcctgtgtccctccacygcctgcaccacccacctccagagtgcagtgctgggcaagggcagctcaagagracaggaccaggcgcttggcaagacatcagacacacccaacccaaaggcgtggaccccaggcccggcccgtggtacccagcaggtggcactgcagctccccgctcctgcaggtccagcgtcctcacaggaacaccagggcctgtgctccggagccttccttcagacccttcctccacgtgcccacttgggatgcagaatgcagcggagctaggaccccctccacggcctggacctcggctgcagtaaagttacgtgaggcctgtctctcggggcctggaagtggcagccatcagttgctcttgctgacccctcggagcaagcgccgcacaggtggtggctgagacagctggcgcggggggccccaagctgcgccggcctccagcccacccacagctgttgctgaagtcaggcctccctccccagcactggtatctgagtaacggctaagaacctccttcctctggttttgaaaagcagttcgggttgtccaattctgtaacattcatctccattttttaaaaaggtttctctgacgnccccacggcccgagccgcggtgagcgtcgtgttgcatgagcctgggccccgggcttcccgtgcgcctctgccgcaggtgcttctgggcacccatcctctgcgtttcatttgcagtcgactgtacagaaggcactcaccacaataaacctttcctgaaagcagaaaaaaaaaaaaaaaaaaaaaaaaaaaaaaaaa

SEQ ID NO: 488 - DNA, 1200 bp, Homo sapiens
  misc feature (285): n equals a,t,g, or c
gaccggcccacgcttcccgccagtcccctaaccctgaggctgccgcgcggcggtcactgcgccggggtagtgggccccagtgttgcgctctctggccgttccttacactttgcttcaggctccagtgcaggggcgtagtgggatatggccaactcgggctgcaaggacgtcacgggtccagatgaggagagttttctgtactttgcctacggcagcaacctgctgacagagaggatccacctccgaaacccctcggcggcgttcttctgtgtggcccgcctgcangcaagaaggggttaaaagtggaatgtatgttgtaatagaagttaaagttgcaactcaagaaggaaaagaaataacctgtcgaagttatctgatgacaaattacgaaagtsctcccccatccccacagtataaaaagattatttgcatgggtgcaaaagaaaatggtttgccgctggagtatcaagagaagttaaaagcaatagaaccaaatgactatacaggaaaggtctcagaagaaattgaagacatcatcaaaaagggggaaacacaaactctttagaacataacagaatatatctaagggtattctatgtgctaatataaaatatttttaacacttgagaacagggatctgggggatctccacgtttgatccattttcagcagtgctctgaaggagtatcttacttgggtgattccttgtttttagactataaaaagaaactgggataggagttagacaatttaaaaggggtgtatgagggcctgaaatatgtgacaaatgaatgtgagtaccccttctgtgaacactgaaagctattctcttgaattgatcttaagtgtctccttgctctggtaaaagatagatttgtagctcacttgatgatggtgctggtgaattgctctgctctgtctgagatttttaaaaatcagcttaatgagagtaatctgcagacaattgataataacattttgaaaattggaaagatggtatactgtttttagaggaataaacgtatttgtggtttaaaaaaaagagcaacttcctttgcactgtatacccttttgtattattaggattttatactatgtttatatgttgcctatttaataaatcgcttaaagttatatatcttgaatatctttccataaaaaaaaaaaaaaaaaaaaaaaaaaaaaaaaaaaaaaaaaaaa

SEQ ID NO: 489 - DNA, 285 bp, Homo sapiens
  misc feature (21): n equals a,t,g, or c
  misc feature (242): n equals a,t,g, or c
tgcctggcacacacgtttctnttccccacttcctttgggggtgtgcttcactgcgggtcgctaacaggatgtctagtgttcagtggtggtcacaagattcagtctgcagagccgacttcctcagcctcctgaagacactgaacaccgcagtgttttccagtcagcaacgcaacaaaatcagtttaagtgataatgacaataacaaacaatccatagcatccacagcattcactgcttactgnaaaacttactatgtcccaggcacaagcactgactttaatcttg

SEQ ID NO: 490 - DNA, 682 bp, Homo sapiens
  misc feature (57): n equals a,t,g, or c
  misc feature (62): n equals a,t,g, or c
  misc feature (80): n equals a,t,g, or c
gggaagggcgggcaggagggcagggaagccgtcacccaggcacaaagcgcctcccgntgagnggactccaaagggacggnccgcggtgtgcagcgagctgcgctcaggggaccttgcgcccggcccttctgctgcacacagcccacccaggacctcccgcagcgctgacaggcggggcgggtgcaaagacggggcggggtctctgcgcccggccccctcccctgactatcaaagcagcggccggctgttggggtccaccacgccttccacctgccccactgcttcttcgcttctctcttggaaagtccagtctctcctcggcttgcaatggaccccaactgctcctgcgccgctggtgtctcctgcacctgcgctggttcctgcaagtgcaaagagtgcaaatgcacctcctgcaagaagagctgctgctcctgctgccccgtgggctgtagcaagtgtgcccagggctgtgtttgcaaaggggcgtcagagaagtgcagctgctgcgactgatgccaggacaacctttctcccagatgtaaacagagagacatgtacaaacctggattttttttttataccaccttgacccatttgctacattccttttcctgtgaaatatgtgagtgataattaaacactttagacctgaaaaaaaaaaaaaaaaaaaaaaaaaaaaaaa

SEQ ID NO: 491 - DNA, 1859 bp, Homo sapiens
agggaaaaaagatctggcggatgaaaataaccagaatgaaaatagctagaaaactcagcaagcaggaagctccctttctcacccttttgttcccttgccgatagaatcagtcactattagaaaaaatgaaagacgctctgtttaaaacaatgatgacagcagtacttaatatgtatttcgaggtgaacttatatagattgagagaggctgcatttggcagactgatgtataggaagacccatttgtttctagcttctccctgcagggaaaatgctttcgtcattatagcctctttacacagactggccattctagtgaacaggtggtaaacctttgggctgcccagaaacattttatctgktttcacttacctaggaaggggaaagattagcgggtcatccaaaatctgtatgtaagctatcttcattttcttccccaaccttctcctcctgggaaacacaaatgctatctcatctgacaaaaggttttagaggataaagctgaaaagattggattgggatctttttgtggcttggggcggactttttgctaaaatctcaagaatgctgctttgagtttagctagggtggctctcagaactggggtgcctggcattctcagcatttctcaggggcctcccacctctgacaactgcagtgttagctaatacataccttgagcatagaactgaatgctgtaattcagagccattttttttttcaacttgaacattgtacaattttactgcaatttcctttgaactttcttgccactgtttggaatcttaaaaattcattagccttctcctttctgacataaagctactcttcatcagagatgagttcctatgtatgtcctttgttccttcaatagctaattaatgtgcttgaggatacttcagtggaaaaaaaggtttaaatatgcaaattactaataaatgtgtaaccttatgtaacttgtgttacatcaagtaacaagctaatctagtttgtttcactggactaggcttgtgctccctacttcagtattttgatgctttccttgatctttgtttcacaaaatgttgtgaattttggtatcattcaaaacaaatgacatttattagggtttcattttgaaacgatgtacagacaagtccccaacttagaaaccggtttgttcttaaggttcttgcgtcacccatagaagcccactgacctccaccacagcccaaatggagggctgtgatagccagatctggttggcttttgtgggctgacccagacatttaatcaccatctcttatgttgttgccgtaagaaatgcattccaggttgggacttgggatcctgagagcacattcgccccctgtggtggccgcttgccacytkgcaagatggaagcccagtctccttactaccaaactgtagttgtaagcagagggaggggtgagatgtttataggacattccctaagctggggagtgatttttatcactattcatgtcaactgtactttggtatagactccctatcaatttaataatatgaaaagcctaaaataaaactatgcatgctattctatgtgctattttatatcagtaaataagcttatgcttgccagttgtatacacagttatgaggtgtatagaactgactttgacagtattttttgcactgtttcctatctgtttttataaagtcttatttagatattggaccttgttgatgttctcactgcccttgtgcttgctataaaatgtttcatatgtgcctttacaaatgtgagatctttattctaacctttttttgtaaaagatatctattgatttccatatgcaataaacctttttttcagagaaaaaaaaaaaaaagtcgagc

SEQ ID NO: 492 - DNA, 2709 bp, Homo sapiens
  misc feature (2160): n equals a,t,g, or c
taaacccattggtccaaggactatcaactggtgacgtggtcccgggatcagaccttgagaatgtggcgggtggattcccagatgcagaggctttgtgcaaatgacatattagatggtgttgatgagttcattgagagtatttcccttctgccggaacctgagaagaccctgcacactgaagatacagatcaccagcacactgcaagccatggggaggaagaagccctaaaagaagatccccctagaaatctcctggaagagaggaaatcagatcaactggggctgcctcagaccttgcagcaggaattctccctgatcaatgtgcaaatccggaatgtcaatktggagatggatgcggcagacaggagctgcacagtgtctgtgcactgcagcaaccatcgtgtcaagatgctggtgaagttccctgcacagtacccaaacaacgccgccccttccttccagtttattaaccccacaaccatcacatccaccatgaaagctaagctgctgaagatcctgaaggacacagccctgcagaaagtgaagcgtggccagagctgcctggagccctgcctgcgccastcgtctcctgccttgagtcckktgtgaaccaggwagacagcgcttccagcaacccgtttgcactccccaactctgtcactccccccttaccgacgtttgccgggtgaccacggcttacgggtcgtaccaggacgccaacattccctttcctaggacttctggggccaggttctgcggacagkttacctggtatatttcacaaggcccatgacaatgcatcgggcggtgtctcccacagagcctactccgagatctctctcagccttgtctgcttatcacactggcttgatcgcgcccatgaagatccgcacagaggcccctgggaaccttcgtttatacagtgggagccccactcgcagcgagaaagagcaggtctccatcagctccttctactacaaggagcggaaatcaagacgatggaaaagtaagcgtgagggatcagactctggcaatcgacagatcaaggctgctgggaaagtcatcatccaggatattgcttgcctcctgcctgttcacaaatcgctgggagagctgtacatattgaatgtgaatgatattcaggaaacatgtcagaagaatgccgcctctgccttgctcgttggaagaaaggatcttgtccaggtttggtcgctggctacggtagctacagatctttgccttggtccgaaatctgacccagatttggaaacaccctgggctcgacatccatttgggcggcagctgctggagtccctgttggctcactattgccggctccgggatgttcagacactggcgatgctctgtagcgtgtttgaagcccagtctcggcctcaggggctaccaaacccctttgggccttttcctaaccgttcttctaatcttgtggtgtcccatagtcgatatcctagctttacctcttctggttcctgctccagtatgtcagacccagggctcaacactggcggctggaacatagcgggaagagaggcagagcacttgtcctccccttggggagaatcctcaccagaagagctccgctttgggagtctgacctacagtgatccccgtgagcgagaacgygaccagcatgataaaaataaaaggctcctggaccccgccaatacccagcaatttgatgactttaagaaatgctatggggaaatcctctaccgttggggtctgagagagaagcgagctgaagtgttgaagtttgtctcctgtcctcctgaccctcacaaagggatcgagttcggcgtgtactgcagccactgccggagtgaggtccgtggcacgcagttgccatctgcaaaggcttcacgttccagtgtgccatctgtcacgtggctgtgcggggatcgtccaatttctgcctgacctgtgggcacggtggccacaccagccacatgatggagtggtttcggacccaggaggtgtgtcccaccgggtgtgggtgccactgcctgcttgaaagcactttctgaacctacagaagttgggtattgtctgaaatcccagaggacccataagtgccggtgacaagctgtctgtcaggggagaggctccagaacctgggttcgtccccagtgagaccggagnatgatcccccaaggactgcgcagcatcagctcttggtgggcctctgccttctcttctgtttggccacctggtgtggatgtcactgtgtgaagataaggacagaagtgcagagctgcgctttgtgtgttgtctatgtcggctgagctaccaaggtggaagttttcatggagaaaagcacctggctccagggccagtgttacagtgttaccctgtaaggtgttagccttaaaccaccgagcagcgttctcttgatgccagtgcagagaccagagtcagatgcccgaggacagtgggtaggaatttcatcaacaaatggacctatggcatcatggctttagaagctggtacatttactgagctgatggacagtggccttctaaaatatgacacttaaattgtaaatatgcactgtacttaaggattcttaagatgtatttttttgttatttctcctccagctgctatcccttggctaataaaattctagtaatttgaaaaaaaaaaaaaagagagaaarttaaaaaaaaaaaaaaaaaaaaaaagggcggcc

SEQ ID NO: 493 - DNA, 1451 bp, Homo sapiens
  misc feature (1307): n equals a,t,g, or c
ttgaaaaatggcagaaactagacagtagttgcctgggagggagggtatcacacttttagcacttgtttgactgtctcctggttgcaggaggaccagtatgatcatttggatgctgctgacatgacaaaggtagaaaaaagcacaaatgaagcaatggagtggatgaataacaagctaaatctgcagaacaagcagagtttgaccatggatccagttgtcaagtcaaaagagattgaagctaaaattaaggagctgacaagtacttgtagccctataatttcaaagcccaaacccaaagtggaacctccaaaagaggaacaaaaaaatgcagagcagaatggaccagtggatggacaaggagacaacccaggcccccaggctgctgagcagggtacagacacagctgtgcttcggattcagacaagaagcttcctgaaatggacattgattgattccaacacttgtttctattaaaacagactattataaagctttaagttgtcaactttgttctaaatatcaactagcgcaagtgaatactgaagatttcttagtcagtttttaggggattttcggggaggggaaataggtaatgtatggagcattttcacttctaaatagttagatacagaaattaagtgcattgtatctttttcataatggtactatttagaagcccagttagtcttactgagcttatgcttcactcctttatgtttaaccatgtgtctacaagaataagtttgttttggaaagttgagctatagctacagctctagctatccagcagacttttcattatgacttacatggcaggagctctaattatgctttaaaaatctgttgtggagattgctttaaatgctccctgcctggtgtggggatggggtccccctctttgtgagggctggagcatggcacggcatggattaacacggcagaggaacaaaggtgtgctctgagcttcttcatatttcaccttcaccctcacctgtgttctcttccctctctcccaataaaagggctcccattataaatgccatgtacttctcttgggaaaatagacccccttgcctagagtaagttgttaactgagggctttaaacctggaggctcttcctgaaagtatgttcatgaataccccaagcatcaaggtctaaataattttcagaagattagaattgggtagatatactgttggatatagccatggtaaatttaactgaggaattaaatccttgttaattttggttaaaaagaaaaaggctaattaggcgaggttccttgtggggaatgctgctgcgggnttaacggaggaactatggcgcagtgaccgtggagacctccggttaggggccccctcccgcttaagcgccgcacgggtgcggcgaagccacgtgcttctagctcgacgtgtgttcgcaaacggcggcttcgtactcaattcgcac

SEQ ID NO: 494 - DNA, 1268 bp, Homo sapiens
ggcacgaggtcgtagagcacaacccgatctccgtcctggacagcccctccagtgattgctttgcagaatggcctggtgagttgggcagaggttggatggacagaaacaaacacacagagagtgaagtccaaggacgctggtcttctttctccctttgtagagtgaggatgaagctctgcagcgggccctggaaatgtccctggcagaaaccaaaccccaggttccaaggtaccttaccctcttgtgaaagagagcgcaactgtgggcaagggcttggtctggaggcaggtaggtgggaccactctgacacaatgcaagataatcgctggcaacttggtctcaaaattaagatgaactatatgatctttgacaagttatttaacccatggagccttcatttcctctataaaacggggacaatactaatacccaccttgtagtgttgctatgaagattgagataatcctcagcagtgctcagcaccatgaggcccaacacacacagatcagatgttcaaatttcagatcttaccatcatccaacttaaactgtttctccctcccagttgtcaggaggaagaagacctagctttagcacaagcactgtcagccagtgaggcagaataccagcggcagcaggtatgaggctgggctgaagatatatgctgcagtggaagggaggaagaagtcagggatgggggttcttcctagtggtgcagagttttggaatggtggttatcgtctggttttcagtatgactccagcccatgctgagctctgaaatgagggctgtccctcatttccttgacgttgcactgtgtcttcccctccttcccctctctttgctctaggcccagagccgcagctcgaagccgtccaactgcagcctgtgctagggccctgggcttggggagggaggttcacctgaggaggactgtggccctcacacctctagggtacacagggagaggaggcccggagcaccctggagggcagagacaagcgggagtgatgtggaggtcgccctgggagcctctggaaggccttgctagtgctccagctgcatggaagagagcggctagcaactgttccctggttgggccctcagtggatgctggccaggccctactcttagccccttcatcatgtcatctcccttatgctggagctgccccgatgtggagtgggcaggaaggggcctggaaaaaataaaggatcttggcagttgataaaacgtaaaaaaaaaaaaaaaaaaaaaaaaagggggggg

SEQ ID NO: 495 - DNA, 384 bp, Homo sapiens
  misc feature (360): n equals a,t,g, or c
  misc feature (382): n equals a,t,g, or c
aattcggcacagacgcaccaggcgcctctcaactgttcactttaagatgttgaaatgtacaggatgtgaatttcacctcaaattaaaacattaaaaaaagaaaatggtacacagtgcccgccctaggtgttgaggaattcccagttcacaatctcctgagcagtgcgtggcatctacagagaggcccgtyttttccttttcattaagacagggtctctgttgcctaggctggagctcagtggcacaatcatagctcgctgcagccttggaactcccaggctcaggtgatcctgccttcagccccggcccgagtagctgggaccccaggcatgcaccattacaaccaactaattttttttnatttttaattaatttcctttgnga

SEQ ID NO: 496 - DNA, 975 bp, Homo sapiens
aattcggcasagcgggaagttgctctcagaggcagcgtgcgggtgtgctctttgtgaaattccaccatggcgtaccgtggccagggtcagaaagtgcagaaggttatggtgcagcccatcaacctcatcttcagatacttacaaaatagatcgcggattcaggtgtggctctatgagcaagtgaatatgcggatagaaggctgtatcattggttttgatgagtatatgaaccttgtattagatgatgcagaagagattcattctaaaacaaagtcaagaaaacaactgggtcggatcatgctaaaaggagataatattactctgctacaaagtgtctccaactagaaatgatcaatgaagtgagaaattgttgagaaggatacagtttgtttttagatgtcctttgtccaatgtgaacatttattcatattgttttgattaccctcgtgttactacaagatggcaataaatactatgggattgtttgtattaaaaaatttacattgcttcttactattcagcagtagaaactttttacacagtaacaccattcgttgytggtatttagttttctgaagggtcgcagttgccttgagcacttggtattcgcagagcttggacctgtagattttgaggcagattaggaattctgcctgatgggtaagcttccagtattgggaggtggagaaggggagggttcagaaaaataaataagagttattgcactaacaaaagtcttcatcacttgtagttctggatgctggaataccaragtttctaacctaaatackttgggtacattatttaatggggtcmgtattgctcmacmcyctcattgartcmctgtgaggtcttkgtgaattttatcgctaagatcagaatgtgagaagtatttggatatagggaaagaatgaagtgcctttcaagtacattaaaaatcaagttaagagtttacaggaaagagactgagattgg

SEQ ID NO: 497 - DNA, 2075 bp, Homo sapiens
ttcagggtgccctcgggagccctgtccctgttgctgtggcccctctcacgccgccatctytytgccccgccccgcccctccggcctccccacaccccccttgccctcactacctgtatctcaccggcgtgtgttcaccctcccgggtggctcacacactctcattcacacacacaaatctcaggaacaaacggtcccagagtcctccggacccctgcccagggtctctgcaggtctctgccccacgcgttcccgtcgctgacaaagccaccagctgcctcctttaagcttggtgctccggctctgggcctttcttgcgctctatttttttttttttttttttaagaaaaacaacaacaacaaaaaaagacaatgaaaaaaaaaacgtcatgtgagtgaagagatgtcactgtctgtggtcttggagaactagtctcgtagctgaggggtggggtccctctgtctggggcactggcacccacagcaggactccgccagtctgatgccaggactgaataaagtgtatttgccccgaccttgccctgtggttctgcatgtctgtgctcttcctcaaccctccctaaacagtttgccagattcaagtccgtgtgatttgggcccgagctgggtgtcccagggcaagccaccttgcctgtctaggcctctatgtcaggactccctggccttcatgaagaatagcaaactcatccctgtagggaccaggcaggtaacatagacgagtgactctgggtggacagtggtgtcatgacccacttcaaggggcctacctcctgccagttgtgaccctgtggaatgcagtccacagtggccaggtggccagatttttcaagaaaagctggatggatgtttctgagtcatcttaatttcaaaatgagactcatattttaaaatttctgtgggccaaatgaaacaagtatgcaggcaggtctggtccgagggggctggcttggcatgcctttctgtgcctttaatgaggactaagaagcaagattgggccacactgtctggactcaaagcccagctccaccactgagcacccgtgtgactctttccatatgtataacgtggggataataataatagctgcttcacaggatgaaatgaagtttgaggtgagaagcattcaccatggtgcccatcgtgttactccattgtcagaggaggaaacggggtcaggcaggaaagcaacttaaaggagggcctgcaagcagccagggtcagagacagggcttggttctgcttcctggtgaagcatggcttcggggtgctgcctctccctccctgtttgaatctgcagattgtgttaggcccccagctgagggcctggagtggtgggattggtcccagtgcctggcgcacattggcctgcagagtagattaactgaatgaccaaagagcaacagaagtctagtgattcttgtctttgargttctgactggtgttttacaactgagtccaaggcttttccctcctttgtccctctgacacccctccccctaattctcatctgtcagatccagtgtattcctaagctgggacaaarcctctgttttcccagtaggagccagggctgagtgtggaaattacagtgactgcttcttctcagcttctctggttgaaagcaagctggcgaagtaagaggaggtagagttgagaaggtgtggaagatagggacagctgcccccagaactcccttcaagggaggacttccccagctatgggaagtgccatcagggtggccgcagctgcagagagccacttcacctgagaccacgcccttcctggggcagcctgtatctggtgtctgagtgaggcatggtataaacacctggtcatttcaatccaacatgggacggacactgacagacagtactcccagcaggcccaggccagccagggcttcgtcaggcctgcagcacaatttgacttcctatgcccaggcctgcttcctcttcttcctcttcttttcacaggtgcttattcctaataaacatcttgcaacccaaactcagtctcattgtctgtttctagagaaacccagtctacaacagaggg

SEQ ID NO: 498 - DNA, 1904 bp, Homo sapiens
gctaagctgcagtgatgttgcctatatttaaattttctcaaatggccaagctctgatggtctactttatttgagcaatagttgagacttaattgcctataaataaacaaacaaatgamctatttgtttttttttctcacaacatctggcctatattgtctgtcaggargccatggctccaatgtaaagtacatagttcttacatactttcaactgcagctggtccctgacctcaccaggtwtcagagatgttctwaaaggaagccagctgtggcaggtcacagattcatgggaaatggaaagaaccaaggaatatagctcttgcctcacctttctacccactgcagatatagttcaagccagagtaatggaagaacttaacttactagcctctcaggctgctcctatccctacctcccagtgtacagcccctccccatctctttagtcccctttccctcacttccccttttataatgtcacacaaatcagggacagtaggatcacattataacctactttgtcatagggattcgatttttcttatatcaaatcatgtttcctgaaacccagctggggcatatgcactcaatgtctaatacatacttattaatgtaccggatattggccttgcccctggatatcagcaatatattataaaaggttccagtagatgagacgattgagtctgaatacaattgcagtaaattgtgccaataaagatattgtactgttacggtcttagagttaaagccgcttgaatgcagcatgcacattcatgtaaacagacaatcagggtaggcctagaataaccacaaaaattctattggccttactgcagccacctatatgtagaacaatggaggagatagtttgtggtccattattgtaccctgtttcatccattagcatcagaatctctctttcaggtcatttattaaatatgattgaaatgtttaaaagttcctgaacatgattcatgatgattaaaatatcatacaactgataaaagactttaagaactttatatatttcctgttgcctcaaaatgtaacagaaattattcttagagctttgattttagctatcctaattactgcaaataaatatttgttcttatagttttaaatcaaaaagaaaagtcttgttataaaaccttaagcttgaaatcatattaataaaatrtattgtacatagtggaaaattttcagtagctaatttaaaatttcagaaaatgctattaaagaattttgattcaagtatttaaactgtttagttatgcatgcttcttattaaccgaaaatgataataccatttagtttagtgatcagtatgagaagcaatacctaatcctatgttgctattgtattttttcctagttggtgtgcctgctcagaaaaacatatactgtatgtgtatacatacctgtgtatatataaaaggtcaatttatatatttttctataggaaaatggagtaacaagttccctatctcccatatttatttgtccatagtaaaatggccacattgatgataatttctagaactagtttctgagattgtcagccctttgtctaaaataatggcagtattaatgattgacttctgtcactgccatagttacctggattgtcagccttggtagcctttgtctaaagtcctaaagagttccaaaaaaaatgtgttgaaatttaattgctaaatagtggttggtgattctttacagtaggaattgtaataattttcttgcaaataagttatttactgctattgatattgaataatttgtcttttattcagatatatttcaaaaagcatgaatatatgattattcataaattgtatactttaccagtaagttttcagaggaaataaagacttttaaatccttttcaaaaaaaaaaaa

SEQ ID NO: 499 - DNA, 2871 bp, Homo sapiens
  misc feature (267): n equals a,t,g, or c
  misc feature (1642): n equals a,t,g, or c
ttttttgttgtttgtttgtttgtttgtttaaaaaacggggtctcactttgttgccaggctgatctcaaactcttggactcaagtgatcctcccgcctgggcctcccaaagtgctaggattacaggtgtgagccacagagctcggccaaagaataaaagaatggctactccatgggcagagcagcctcttgatttttatgtatgttgatataagcaaattatctggaatttatctgctatactgataaaaatcagtaaaccttgttantgtcagcatctaatctgtattaaacttttacttatttccctttactttttagattcaaagagarggttcacacagatatctttcatgctacattattgagcttaaggaagataaatttcccaaatatgatatttggtatatttgtgtgtctgtaattttttttttaatttaatgctgtatttaatttgtaagtcctgccattgactctaccagaggagattcttcaagcttagttgctgaacttcaagaaaagcttcaggaagaaaaagctaagtttctagaacaacttgaagagcaagaaaaaagaaagaatgaagaaatgcaaaatgttcgaacatctttgattgcggaacaacagaccaattttaacactgttttaacaagagagaaaatgagaaaagaaaacataataaatgatcttagtgataagttgaaaagtacaatgcagcaacaagaacgggataaagatttgatagagtcactttctgaagatcgagctcgtttgcttgaggaaaagaaaaagcttgaagaagaagtcagtaagttgcgtagtagcagttttgttccttcaccatatgtagctacagccccagaactttatggagcttgtgcacctgaactcccaggtgaatcagatagatccgctgtggaaacagcagatgaaggaagagtggattcagcaatggagacaagcatgatgtctgtacaagaaaatattcatatgttgtctgaagaaaaacagcggataatgctgttagaacgaacattgcaattgaaagaagaagaaaataaacggttaaatcaaagactgatgtctcagagcatgtcttcagtatcttcaaggcattctgaaaagatagctattagagattttcaggtgggagatttggtactcatcatcctagacgaacgccatgacaattatgtgttatttactgttagtcctactttatattttctacattcagagtctctacctgccctggatctcaaaccaggtgagggtgcttcaggtgcatctagaagaccctgggtacttggaaaagtaatggaaaaagaatactgtcaagccaaaaaggcacaaaacagatttaaagttcctttggggacaaagttttacagagtgaaagccgtatcatggaataagaaagtataacttatggacaaaattaatacattctatgacatttttttctgatttgtcctgcagtgctcattcatcactccaaaaacagcaggccatctttttatgcaaaagtcagcgtgacaatatacttcactggtgtacatcgtttactttttaactggcttcattttaggaataataaattcatcagaatccttggctgaattaaaatggtttttgttttttggntttttttttttacccagacaactctagaaatgcggaccaaactacttcattttctcaaagggcataccttgtgcattgtggcttatgatgagccatattaattgcctgttaaatatacactagcttgaacttagatgttaaatgttattattaccagcatttgtccttttgtgaaatcagtatcagaatacttgcactctttaacacattctttataaaatgtataaattattcagaactatttaaaataaagaggagtgttattgcatgctgataatcattttgagtttgcctcagtagatactaaagcaaattgtttcagtttttttaaatgccctttgatgtttcaaaaaaaaaaaggaactgtaatttgattgactgattttaagatcagccataagtaatcagcaatcttcaaaagcactttcagtggattggtcatctgggttctaaagggaagagtctgtgctactaaccatttcaaatgcagactcaaaccttcccaacatctttatgactctagaataatcatattgatgaaatcgtaattcatggttgagtttcagaacaaaagatattcattgcacattaaccatttagaggtcatttaaataacaaaatattgtattgtaaaagaactgtacaattttaaaacaataaagatttgaacctgtaaatgtgtgtgccttttaaagaaggatacatttttaatatatttgagtgattgctgggaagtgtgaaaatattgttatgtatcatatcaaagagaaacatgtttattacaaaaatgttctttaactatatactatgtaacagggtaaacagtgttatgtagaatagaattgtgtaaactagatctttagagaagttgccattgagcaaagttatttaaatgagttagttgagttggatgagaattgtttgaggtttgttgctagagaacaataataaaataattctttttcagaaaatatttaatttcttcataaaaataagttaaatatttttttaaatatgtatatctaatagtacaaaatggaataaacatcatagtgtatagaaaactgaatttgacaagttaatgaataaatgaacaaatgatttcacatgtttctatttaatctttccatgacatctttatgcaaagactgttaaagcaataactttatatagagggtgattttgttaagcagatctggttaggtgtaaatatrccattccaggtaggt

SEQ ID NO: 500 - DNA, 1624 bp, Homo sapiens
tgtatcaggagccggcccttttttggaaacaggccagcattcagtctccacagaggcaccataaacacgctggtggggccctgtactgtggtcaaagtcaaggcctccgggcaggactcgcggcccctccggctggcgggtggggttgacccgcacgtcccgccccgcctctccctccgcgctccggacgggcgacggtagctcgagacccgggactccgcccgcctccccgcgagtatttgaggtccggggcggctccggcgcctctgcccgccgttctgctcgctcgctccccgctctggagtctgccatcatggatgttctcgcagaagcaaatggcacctttgccttaaaccttttgaaaacrctgggtaaagacaactcgaagaatgtgtttttctcacccatgagcatgtcctgtgccctggccatggtctacatgggggcaaagggaaacaccgctgcacagatggcccagatactttctttcaataaaagtggcggtggtggagacatccaccagggcttccagtctcttctcaccgaagtgaacaagactggcacgcagtacttgcttaggatggccaacaggctctttggggaaaagtcttgtgatttcctctcatcttttagagattcctgccaaaaattctaccaagcagagatggaggagcttgactttatcagcgccgtagagaagtccagaaaacacataaacacctgggtagctgaaaagacagaaggtaaaattgcggagttgctctctccgggctcagtggatccattgacaaggctggttctggtgaatgctgtctatttcagaggaaactgggatgaacagtttgacaaggagaacaccgaggagagactgtttaaagtcagcaagaatgaggagaaacctgtgcaaatgatgtttaagcaatctacttttaagaagacctatataggagaaatatttacccaaatcttggtgcttccatatgttggcaaggaactgaatatgatcatcatgcttccggacgagaccactgacttgagaacggtggagaaagaactcacttacgagaagttcgtagaatggacgaggctggacatgatggatgaagaggaggtggaagtgtccctcccgcggtttaaactagaggaaagctacgacatggagagtgtcctgcgcaacctgggcatgactgatgccttcgagctgggcaaggcagacttctctggaatgtcccagacagacctgtctctgtccaaggtcgtgcacaagtcttttgtggaggtcaatgaggaaggcacggaggctgcagccgccacagctgccatcatgatgatgcggtgtgccagattcgtcccccgcttctgcgccgaccaccccttccttttcttcatccagcacagcaagaccaacgggattctcttctgcggccgcttttcctctccgtgaggacagggcagtcttggtgtgcagcccctctcctctctgtcccctgacactccacagtgtgcctgcaacccaagtggccttatccgtgcagtggtggcagttcagaaataaagggcccatttgtgggatgccgcaaaaaaaaaaaaaaaaaaawaawaaaaaaaaaaaaaaaaaaaaaaa

SEQ ID NO: 501 - DNA, 848 bp, Homo sapiens
gtgatactcctgttgcaggaccatttgaagtctgagagtttccaggtgtctggaaatgaagaagatgttcaagctgaaagagtccaagcagcaaatgcactcactactccaaacttggaggaggaaccagtcataactgcaagctgtttacacaaggaatattatgagacaaagaaagttgcttttcaacaacaaagaagaaagcagccatcagaaatgtttcgttttgtgttaaaaagtgaagttttgggattactaggacacaatggagctggyaaaagtacttccattaaaatgataactgggtgcacarwgccaactgcaggagtggtggtgttacaaggcarcagagcatcagtaaggcaacagcgtgacaacagcctcaagttcttgggtactgccctcaggagaactcactgtgtcccaaacttacaatgaaagagcatttggagttgtatgcagccgtgaaaggactgggcaaagatgctgctcttagtatttcatgattggtggaagctctcaagctccaggagcaacttaaggctcccgtgaaaactctatcagagggaataaagagaaagctatgcttcgtgctgagcatactggggaacccatcagtggtgcttctagacgagctgttcaccgggatggaccctgaggggcagcagcaaatgtggcagatacttcaggctaccattaaaaaccaggagaggggcgccctcttgaccacccattacatgtcagaggctaagtctctgtgtgaccgtgtggccatcatggtgtcaggaacgctaaggtgtattggttccattcaacagctgaaaagtttggtaaagattatttactag

SEQ ID NO: 502 - DNA, 3192 bp, Homo sapiens
  misc feature (3085): n equals a,t,g, or c
gagcagaacattggggggcgattcccccagcaggaggtggagcagttggaatttcggagactttcttggggaagaaggtgagaacaaagaccctatcggaagacgacytgaaggagatcccagccgagcagatggatttccgtgccaacctgcagcggcaagtgaagccaaagactgtgtctgaggaagagaggaaggtgcacagcccccagcaggtcgattttcgctctgtcctggccaagaaggggacttccaagacccccgtgcctgagaaggtgccaccgccaaaacctgccaccccggattttcgctcagtgctgggtggcaagaagaaattaccagcagagaatggcagcagcagtgccgagaccctgaatgccaaggcagtggagagttccaagcccctgagcaatgcacagccttcagggcccttgaaacccgtgggcaacgccaagcctgctgagaccctgaagccaatgggcaacgccaagcctgccgagaccctgaagcccatgggcaatgccaagcctgatgagaacctgaaatccgctagcaaagaagaactcaagaaagacgttaagaatgatgtgaactgcaagagaggccatgcagggaccacagataatgaaaagagatcagagagccaggggacagccccagccttcaagcagaagctgcaagatgttcatgtggcagagggcaagaagctgctgctccagtgccaggtgtcttctgaccccccagccaccatcatctggacgctgaatggaaagaccctcaagaccaccaagttcatcatcctctcccaggaaggctcactctgctccgtctccatcgagaaggcactgcctgaggacagaggcttatacaagtktgtagccaagawtgacgctggccaggcggagtgctcctgccaagtcactgtggatgatgctccagccagtgagaacaccaaggccccagagatgaaatcccggaggcccaagagctctcttcctcccgtgctaggaactgagagtgatgcgactgtgaaaaagaaacctgcccccaagacacctccgaaggcagcaatgccccctcagatcatccagttccctgaggaccagaaggtacgcgcaggagagtcagtggagctgtttggcaaagtgacaggcactcagcccatcacctgtacctggatgaagttccgaaagcagatccaggaaagcgagcacatgaaggtggagaacagcgagaatggcagcaagctcaccatcctggccgcgcgccaggagcactgcggctgctacacactgctggtggagaacaagctgggcagcaggcaggcccaggtcaacctcactgtcgtggataagccagaccccccagctggcacaccttgtgcctctgacattcggagctcctcactgaccctgtcctggtatggctcctcatatgatgggggcagtgctgtacagtcctacagcatcgagatctgggactcagccaacaagacgtggaaggaactagccacatgccgcagcacctctttcaacgtccaggacctgctgcctgaccaygaatataagttccgtgtacgtgcaatcaacgtgtatggaaccagtgagccaagccaggagtctgaactcacaacggtaggagagaaacctgaagagccgaaggatgaagtggaggtgtcagaygatgatgagaaggagcccgaggttgattaccggacagtgacaatcaatactgaacaaaaagtatctgacttctacgacattgaggagagattaggatctgggaaatttggacaggtctttcgacttgtagaaaagaaaactcgaaaagtctgggcagggaagttcttcaaggcatattcagcaaaagagaaagagaatatccggcaggagattagcatcatgaactgcctccaccaccctaagctggtccagtgtgtggatgcctttgaagaaaaggccaacatcgtcatggtcctggagatcgtgtcaggaggggagctgtttgagcgcatcattgacgaggactttgagctgacggagcgtgagtscatcaagtacatgcggcagatctcggagggagtggagtacatccacaagcagggcatcgtgcacctggacctcaagccggagaacatcatgtgtgtcaacaagacgggcaccaggatcaagctcatcgactttggtctggccaggaggctggagaacgcggggtctctgaaggtcctctttggcaccccagaatttgtggctcctgaagtgatcaactatgagcccatcggctacgccacagacatgtggagcatcggggtcatctgctacatcctagtcagtggcctttcccccttcatgggagacaacgataacgaaaccttggccaacgttacctcagccacctgggacttcgacgacgaggcattcgatgagatctccgacgatgccaaggatttcatcagcaatctgctgaagaaagatatgaaaaaccgcctggactgcacgcatgctttcagcatccatggctaatgaaagataccaagaacatggaggccaagaaactctccaaggaccggatgaagaagtacatggcaagaaggaaatggcagaaaacgggcaatgctgtgagagccattggaagactgtcctctatggcaatgatctcagggctcagtggcaggaaatcctcaacagggtcaccaaccagcccgctcaatgcagaaaaactagaatctgaagaagatgtgtcccaagctttccttgaggctgttgctgaggaaaagcctcatgtaaaaccctatttctctaagaccattcgcgatttagaagttgtggagggaagtgctgctagatttgactgcaagattgaaggatacccagaccccgaggttgtctggttcaaagatgaccagtcaatcagggagtcccgccacttccagatagactacgatgaggacgggaactgctctttaattattagtgatgtttgcggggatgacgatgccaagtacacctgcaaggctgtcaacagtcttggagaagccacctgcacagcagagctcattgtggaaacgatggaggaaggtgaaggngaaggggaagaggaagaagagtgaaacaaagccagagaaaagcagtttctaagtcatattaaaaggactatttctctaaaactcaaaaaaaaaaaaaaagggcggcc

SEQ ID NO: 503 - DNA, 683 bp, Homo sapiens
  misc feature (622): n equals a,t,g, or c
  misc feature (626): n equals a,t,g, or c
  misc feature (648): n equals a,t,g, or c
tttggcgcgtctctgccgggcctatccggctccatccaacctctgaccgtctcgcgggggccgcagttcgtccccgcggctacggcggcttgctcccgaccctgcaggcggctggatgttggggcgagsggcaagatggcagaagtagagcagaagaagaagcggaccttccgcaagttcacctaccgcggcgtggacctcgaccagctgctggacatgtcctacgagcagctgatgcagctgtacagtgcgcgccaggcggcggctgaaccggggcctgcggcggaagcagcactccctgctgaagcgcctgcgcaaggccaagaaggaggcgccgcccatggagaagccggaagtggtgaagacgcacctgcgggacatgatcatcctacccgagatggtgggcagcatggtgggcgtctacaacggcaagaccttcaaccaggtggagatcaagcccgagatgatcggccactacctgggcgagttctccatcacctacaagcccgtaaagcatggccggcccggcatcggggccacccactcctcccgcttcatccctctcaagtaatggctcagctaataaaggcgcacatgactccaaaaaaaaaaaaaaaaaaangggnsggcccggtcttaaaggatccnaagcywacktacsctgctgcaactctactctctcc

SEQ ID NO: 504 - DNA, 2196 bp, Homo sapiens
  misc feature (18): n equals a,t,g, or c
  misc feature (2104): n equals a,t,g, or c
  misc feature (2148): n equals a,t,g, or c
  misc feature (2196): n equals a,t,g, or c
tcgacccacgcgtccggnagttaaccttttgcctaaacttggagagctcatacatactatgtgttaggggtacagaagcttttcctcatagggcatgagctctccaagagttaaccttttgcctaaacttggggtttctgtggttcataaagttgggatatrtwttttttttcaaatggaagaaaatccgtatttggcaagaagactccaggggatgatactgtccttgccacttacagtccaaagattttccccaaagaatagacattttttcctctcatcacttctagatgcaaaatcttttatttttttcctttctcacacacaccccagacccctaacgttaagccagcttccatctccccattccacacgatcttgagtagcacacgttatgktcgkttcctccgaagaktgttgtattwgggtctgaragscagaggggctkggaaagacttgttatagtccgtktgggaatgagagaagtcggtgcagawtagtaaacgggagtctgtttcccacaggtccccttcccctgagcccatctacaatagcgaggggaagcggcttaacacccgagagttccgcacccgcaaaaagctggaagaggagcggcacaacctcatcacagagatggttgcactcaatccggatttcaagccacctgcagattacaaacctccagcaacacgtgtgagtgataaagtcatgattccacaagatgagtacccagaaatcaactttgtggggctgctcatcgggcccagagggaacaccctgaagaacatagagaaggagtgcaatgccaagattatgatccgggggaaagggtctgtgaaagaagggaaggttgggcgcaaagatggccagatgttgccaggagaagatgagccacttcatgccctggttactgccaatacaatggagaacgtcaaaaaggcagtggaacagataagaaacatcctgaagcagggtatcgagactccagaggaccagaatgatctacggaagatgcagcttcgggagttggctcgcttaaatgggacccttcgggaagacgataacaggatcttaagaccctggcagagctcagagacccgcagcattaccaacaccacagtgtgtaccaagtgtggaggggctggccacattgcttcagactgtaaattccaaaggcctggtgatcctcagtcagctcaggataaagcacggatggataaagaatatttgtccctcatggctgaactgggtgaagcacctgtcccagcatctgtgggctccacctctgggcctgccaccacacccctggccagcgcacctcgtcctgctgctcccgccaacaacccacctccaccgtctctcatgtctaccacccagagccgcccaccctggatgaattctggcccttcagagagtcggccctaccacggcatgcatggaggtggtcctggtgggcccggaggtggcccccacagcttcccacacccattacccagcctgacaggtgggcatggtggacatcccatgcagcacaaccccaatggacccccacccccttggatgcagccaccaccaccaccgatgaaccagggcccccaccctcctgggcaccatggccctcctccaatggatcagtacctgggaagtacgcctgtgggctctggggtctatcgcctgcatcaaggaaaaggtatgatgccgccaccacctatgggcatgatgccgccgccgccgccgcctcccagtgggcagcccccaccccctccctctggtcctcttcccccatggcaacaacagcagcagcagcctccgccamcccctccgcccagcagcagtatggcttccagtacccccttgccatggcagcaaaatacgacgactaccaccacgagcgctggcwcagggtccatcccgccatggcaacagcagcaggcggctgccgcagcttctccaggagcccctcagatgcaaggcaaccccactmtgggcmccatggccctcctccaatggatcagtacctgggaagtacgcctgtgggctctggggtctatcgcctgcatcaaggaaaaggtatgatgccgccaccacctatgggcatgatgtngccgccgccgccgccttcccagtgggggcctggggaaatgtgcntggaaggcttgattcagcggggccgggggttggcggcggccgggccgn

SEQ ID NO: 505 - DNA, 949 bp, Homo sapiens
cccacccccacgcctcccgcctacccacgcatcccccctcatcctcctccagggttgggcctgccgccagccagctacccacctcctgccgtcccccctggaggacagcctcctgtgcccccgcccattcccccacccggcatgcctccagttggggggctggggcgggcagcctggcatgagataacgtgagccttttttccctctttgtttttttaacaagattttctaatcgacttgcagagtagttgaagtgggtaagcagcagggtaccttgtataatgcacgacagttgcagtatgggaagaatggaccgggcccctgggataaaatcagagtggtcctcacacctagaggacggggacaaccagctttcagagtagcctcatcagtgcccttgcagtctgactgtgtacacttggttcagctaatgtctgagagtcctgcactgggttactttatactagtgaggacgttaaccagccatattggctcaataaatagcttcggtaaggagttaatttccttctagaaatcagtgcctatttttcctggaaactcaattttaaatagtccaattccatctgaagccaagctgttgtcattttcattcggtgacattctctcccatgacacccagaaggggcagaagaaccacatttttcatttatagatgtttgcatcctttgtattaaaattattttgaaggggttgcctcattggatggctttttttttttcctccagggagaaggggagaaatgtacttggaaattaatgtatgtttacatctctttgcaaattcctgtacatagagatatattttttaagtgtgaatgtaacaacatactgtgaattccatcttggttacaaatgagactccttcagtcagttatccaaataaaagcagttctgaaactaaaaaaaaaaaaaaaaaaaaaaaaaaaaaa

SEQ ID NO: 506 - DNA, 365 bp, Homo sapiens
  misc feature (359): n equals a,t,g, or c
  misc feature (360): n equals a,t,g, or c
  misc feature (361): n equals a,t,g, or c
cagccgccgcagactttctggcaggcgctgcaactgtgttacttcatccagttgattttgcagatcgaatctaacggtcactcagtatcgtttggtcgtatggaccagtatctctacccgtactatcgccgcgacgttgaactcaaccagacgctggatcgcgaacacgccatcgagatgtgcatagctgctggctgaaactgctggaagtgaacaagatccgytccggctcacactcaaaagcctctgcgggaagtccgccatgttcttcgagatattcggtacccaattcgccctatagtgagtcgtattacaattcactggccgtcgttttacaacgtcgtgactgggaaaacgannnagga

SEQ ID NO: 507 - DNA, 2059 bp, Homo sapiens
  misc feature (6): n equals a,t,g, or c
  misc feature (8): n equals a,t,g, or c
  misc feature (18): n equals a,t,g, or c
gtggtnangctccagaantagtggatccggaggctgcagaatggcccgagagggccgaggcgtagtgtgggtgactcctccgttccttgggtcccgtcgtctgtgatactgcagygcagccatggcagaaccgcagcccccgtccggcggcctcacggacgaggccgccctcagttgctgctccgacgcggaccccagtaccaaggattttctattgcagcagaccatgctacgagtgaaggatcctaagaagtcactggatttttatactagagttcttggaatgacgctaatccaaaaatgtgattttcccattatgaagttttcactctacttcttggcttatgaggataaaaatgacatccctaaagaaaaagatgaaaaaatagcctgggcgctctccagaaaagctacacttgagctgacacacaattggggcactgaagatgatgmgacccagagttaccacaatggcaattcagaccctcgaggattcggtcatattggaattgctgttcctgatgtatacagtgcttgtaaaaggtttgaagaactgggagtcaaatttgtgaagaaacctgatgatggtaaaatgaaaggcctggcatttattcaagatcctgatggctactggattgaaattttgaatcctaacaaaatggcaaccttaatgtagtgctgtgagaattctcctttgagatttcagaagaaaggaaacaatgtgattcaagatatttacataccagaagcatctaggactgatggatcactgtcccgattcaaattattcttcagtccatttccccttcctatttcagctgttccttttcacctaactgttcagtcattctggttttcaagcagtgctttatctcatgtccttgaatatagttgtgtaactttattttttaggtaataattagaacagttcccttcagaggctgcatttgccttcttctgccacctaaatattacttcccttcaaatctgcctttgaatcatcatttttaaaaaaaaattaacatgtttttgttgtagttatcttctggggtttcaattcctcagaaacaacttttttcacaacggaaaggaaagaacactagtgttctttcagtaaagtacaaagtgtttattttacaaaagagtaggtactcttgagagcaattcaaatcatgctgacaaggatactgatagaaaaagtgatttcttcttattataaagtacatttaaagttcaaggactaaccttatttatttgggaaaggggaggaggaaggaaatgatatggtacccagacactgggctaggctgcaactttatctcatttaatactcccagctgtcatgtgagaaagaaagcaggctaggcatgtgaaatcactttcatggattattaatggatttaagagggcatcaatcagctcaactcaagatttcataatcatttttagtatttagattgtgcctcaaagttgtagtacctcacaatacctccactggtttcctgttgtaaaaaccttcagtgagtttgaccattgtgctcttggctcttgggctggagtaccgtggtgagggagtaaacactagaagtctttagtacaaaactgctctagggacacctggtgattcctacacaagtgatgtttatatttctcataaagagtcttccctatcccaaggtcttcatgatgccagtagccatatatgataaattatgttcagtgataacttagttatcagaaatcagctcagtggtcttccccgccatgattcacatttgatgagtttttaaaaatcaaagtgattttgaaaatctctaatggctcagaaaataaaaacatccagtttgtggatgactatatttagatttctctagactctagtggaagacctttggaaaggccatgccaaccgtgcttgtactgctagaagcactttatgtttcctttttgggtgaaatggatttatgtgagtgctttaaacaaatagcaatacttatagactgaaataaaatgaaacttcaaataaraaaaaaaaaaaaaaactcgagactagttctcc

SEQ ID NO: 508 - DNA, 1337 bp, Homo sapiens
  misc feature (726): n equals a,t,g, or c
  misc feature (772): n equals a,t,g, or c
tttgaggagcgctacaccttcgagatccccttcctggaggcccagaggaggaccctgctcctgaccgtggtggattttgataagttctcccgccactgtgtcattgggaaagtttctgtgcctttgtgtgaagttgacctggtcaagggcgggcactggtggaaggcgctgattcccagttctcagaatgaagtggagctgggggagctgcttctgtcactgaattatctcccaagtgctggcagactgaatgttgatgtcattcgagccaagcaacttcttcagacagatgtgagccaaggttcagacccctttgtgaaaatccagctggtgcatggactcaaacttgtgaaaaccaagaagacgtccttcttaaggggcacaattgatcctttctacaatgaatccttcagcttcaaagttccccaagaagaactggaaaatgccagcctagtgtttacagttttcggccacaacatgaagagcagcaatgacttcatcgggaggatcgtcattggccagtactcttcaggcccctctgagaccaaccactggaggcgcatgctcaacacgcaccgcacagccgtggagcagtggcatagcctgaggtcccgagctgagtgtgaccgcgtgtctcctgcctccctggaggtgacctgagggctgcagggaaggcagctttcatttgtttaaaaaaaaaaaaaaaaaaagacggaaaaaaatgtntcacatactattacatccacacctgcatacacactcgcaacatgtntacacacgtccacacacacagacacacagataccccaaatcctctcagaactgagaggaagctgactattgatcacaaaatggccgccctcagtgagtgaggcctaggaactttccagaagccccatccatagatcacaagctcagtgggctctgccgtgggacttattggcagtgcctgcycttgtcaatactcctgccccaaaatgcactttcaaccctcaggccagagaaaggacctcccaaagggtgccaagctccatcaagactaaatttaccaagagtttggccagtgtgtgggagacttgaacaccccccacttccgaaacacacacctactgggtaacttctgaacaggctgctgttccctggggttcttcaaacctgatacctttctccaaaggtgtaagtatctttgtcttctccgtagtaaatgtgataactagattatgggccatttggagaaaccaaatggcaaccaaaactattccagtgtcagaagcctttcctggcttaacagaattgttcttgtgttagctcatcccagggaacgccctgtgggtatg

SEQ ID NO: 509 - DNA, 731 bp, Homo sapiens
  misc feature (10): n equals a,t,g, or c
  misc feature (33): n equals a,t,g, or c
  misc feature (720): n equals a,t,g, or c
aaggtgttcnccttgtgagttaacaagtaaagnagatcattgttaattactattttgtatgaattttgctaaagttaactgtaaagaaacacctgctgacttgcagtttaaggggaatctattctccccatttccaaaccatgatatgaatgggcgctgacatgtggagagaatagataatttgtgtgtttgcaatgtgtgttttagataaataggattgggtatttaaattagcatttgtgaatttaatagcattaagattaccttcaaatgaaaaaaaatctcaaaatttctatttggtttttgtgcattttcttttaaaatgtaatcatatgattttagtgtgttagacttgctgagtcctagctgtgtttagaacatctctattctacatttaccttggtcaaatttgaactgctgccataggttttgggtgtaaagaatgtttactgccctccatttaaattctgaaaagggatggtggatgttttccctctcctacgttagaaaccattcttaaaaacttttgaaaatatagaaccattaagcctgctatatctgagcaaattaatgggtaccttttttttcttatttaaagcacaagaggcccataaatcttgagttactttaaattcttttttttgatacaagttttcagagcaagagaataaaaatcatgtgttattaaacccctaaaaaaaaaaaaaaaaacccgggggncttcttggggg

SEQ ID NO: 510 - DNA, 944 bp, Homo sapiens
gagcaccccctgctggcccctccctccagtctggctggggtgtggtgagatgtgcttgtgtgtccaggtccctgagcgtgacagcgtctcctcagtgtccagtgctacgtcgagcagcagctctgcacacagcgtggactcggaggacatgtacgcagacytggctagccccgtgtcctcagccagctctcggtccccggccccagcccagaccaggaaggagaaaggaaaatctaagaaagaagacggtgttaaagaggaaaagcggaaaagggattcgtccacacaaccacccaaatctgcaaaacctccagcaggggggaagtcctcccagcagccctcgacaccccagcaggcaccccccgggcagccccagcagggcacatttgtggcccacaaggagatcaagttgacactgttgaataaggcggctgataaaggaagcaggaagcgctatgaaccatcagacaaggacaggcagagccctcctccagccaagcggcccaacacatccccagaccgaggttctcgggaccggaagtcaggtkggagactgggctccccgaagccagagcggcagagaggccagaactccaaagcccctgcagccccggctgacaggaagcgccagctgtcaccccagtccaagagctccagcaaggtcacgagcgtgcccggcaaagcctcggatcccggcgccgccagcaccaaatcagggaaggccagcacgctgtctcggcgggaggagctgctgaaacagctgaaggccgtggaggatgctattgcacgcaagcgggccaagatccccgggaaagcataggccgtgccccgaccggactggacgcatttttatacatagggtaagcgcagccattttggattttgcagttaatgtcttattttggctgtgattctttttaaaaagtaaaaaagaaaaaaaagtt

SEQ ID NO: 511 - DNA, 517 bp, Homo sapiens
  misc feature (449): n equals a,t,g, or c
ggtcatggcggcctgcaggtactgctgctcgtgcctccggctccggcccctgagcgatggtcctttccttctgccacggcgggatcgggcactcacccagttgcaagtgcgagcactatggagtagcgcagggtctcgagctgtggccgtggacttaggcaacaggaaattagaaatatcttctggaaagctggccagatttgcagatggctctgctgtagtacagtcaggtgacactgcagtaatggtcacagcggtcagtaaaacaaaaccttccccttcccagtttatgcctttggtggttgactacagacaaaaagctgctgcagcaggtagaattcccacaaactatctgagaagagagrttggtacttctgataaagaaattctaacaagtcgaataatagatcgttcaattagaccgctytttcmagctggctacttctatnatacacaggttctgtgtaatctgttagcagtagatggtgtaaattgagcctgatgtcctaggaattaa

SEQ ID NO: 512 - DNA, 3651 bp, Homo sapiens
  misc feature (1283): n equals a,t,g, or c
  misc feature (3641): n equals a,t,g, or c
  misc feature (3650): n equals a,t,g, or c
gcggactgcgtcttcgtggaggacgtggccgtggtgtgcgaggagacggccctcatcacccgacccggggcgccgagccggaggaaggaggttgacatgatgaaagaagcattagaaaaacttcagctcaatatagtagagatgaaagatgaaaatgcaactttagatggcggagatgttttattcacaggcagagaattttttgtgggcctttccaaaaggacaaatcaacgaggtgctgaaatcttggctgatacttttaaggactatgcagtctccacagtgccagtggcagatgggttgcatttgaagagtttctgcagcatggctgggcctaacctgatcgcaattgggtctagtgaatctgcacagaaggcccttaagatcatgcaacagatgagtgaccaccgctacgacaaactcactgtgcctgatgacatagcagcaaactgtatatatctaaatatccccaacaaagggcacgtcttgctgcaccgaaccccggaagagtatccagaaagtgcaaaggtttatgagaaactgaaggaccatatgctgatccccgtgagcatgtctgaactggaaaaggtggatgggctgctcacctgctgtcagttttaattaacaagaaagtagactcctgagctgcagagtccccccgggwagccggcaagaccgcacaggcaaggccgatgactctgtgcccactcctgttgttttccttgacaatctactgtgccactgtgctactaactcttgtttacaaaatttgattctaagttgaattgcttcattcaacacmcccaccctccctcccctcgmggtggtacctaagctgtggatttgctaaatgaattaagcaacctagaagatacagagcyaatgaattatcaaaatgtgattaatcccagtaaggaaacactcatttagtgtctgtatttttggtgtgaaaattatttagttgccagtatattctgaagaatgtcttcttgatcagtcagataarcttgctttttttttttttttttttcatgaatcatgtttggttcctgtgaaagtccctggtccagggatcctcctcctttctcttttacttctgaattctgaaattcagttagttacttttgcctttcgctcttctatcacagccaccttgaccttgggtaaaacccaaggtctttccttctggctaccttcctgcaggtccaccctgtctgccattggtctcctctgcctctgactacatctgccaccaacaaccctcccctcacccctgccagggncagaacaggcttctcagcagaactgtgactgaaatcagagctgctgtctggggcagtgttaactacacagaggcacatcctgacagggtttgccccagagatctaaattccagaaggagggcaccacacctaggaaggtaaatccagtatcagaaggttgctaaaagattaaagatcaagaagcttggaaacatcccatgggtacaatgtcttagaaagtctttaagtcacataccatgaatttttgcttcattactgaccatatatgaccttggaggaactcttttttttttttccttctactcatttctgtttccacctaccctgactcaccgtatttccagtcttctacccctgcagttatcctagtccagcaaagtcatttctttcaaaagagacatcatgtctgaaaataattactggtagtctaatatgagccagagtaaacagctcctcatggtcaatgaacatgttcaggaagcgatcaccttgatgcttgaacccaaccccagacagtggacaattctactttgaaatatccgtgaatatttactgtgggatccaatttaaacttctttcttctctagcctttaaattacacaactttgaactgacacggatctcttacaaagaacaatgcggcactgaaggaagagatgattcctttactcaaacctgcaggaatcagcctattaacaggcaggggaaacggtactttccaatgaatggtaactgatccaggcacrttatcacacttcctagtcatctccacctttcctgtattgcctgtggcttgttgtttaagattaagaatcaaagagattaagaagtatcacttcaagtcttgctctgctcacttctatgtttgcagtcaaattattccttatgttggtgacctaaagagaattactttcattcatttcatttcccccgtagcagatggaagtgagaaacctctgagaaaatgaaaacatccttaaccactatctttcccttttatttgattattttatgtcagaaatttgcaaaagtttttttctcctccttctcttccttgttgcttaactttttaattcatgccatatgcagatatccaattatgtgcatcctgtgaataaaccacgtcttggtcactgtcatattttgaaccatctcatcagagatgaataatatctttttaccagagagagaacgaatgttagccacatgcccaagttaacaaagaaaaaatgttctcaaggttgtccttttgggttaaatctggcccttccttggcaaaagcaaaaattctccctgtgagagctcaacatctcaaatacaaccacaggaaaaatggcccaatctgccagtttaggcttaccagcatataatttttaatatctttacttctatcatcccaaatcaaagaactcttctctattatgtttaatcaattgcaagcaaatagatttttctttgtaacaatttgttctgcagaaggctgtttttcacttttcctttcttttgcttctttctgtctttccttctcttttgtctggagaaatcacttagactctgtgtgcctcttctacattgcattctgctctgctatgttacctgctaggctggcttctttggactccctatatgattgatgatgtgaaaacctaaattacttgcagcatagtattacttctttgatgttctcattagcataatgttatttttgaaaaggaaagatactatcacataagttttcctcatctgttgtgatatacaccaatggataaactaacggaaactgctttttgacattaaaagacaggagaaattatatttaactaagtaaaagttaagtcagaattacttgggtgatgtgattcaatttagttaaaggatgatatagagaaaatacattatttagcattatttcttcagctataatgaattgctatagaaatcaggcagatctttctaatgtgtattgattggtcttttcagctactctgaacagattactaaggccatctcctcatctctaagggagaaaaatagtctgtagatgaataatgtaaggtaaagagttgcatgtcagtctttgtaattatttacactttaactttctccagaactcagacatgatttcaacatggtgttagatttgtgcattttattttcctgaccacctcattccagccaatgtatggttatccactctgtgtgccaaaaccaatcatgcctttcacggccctttagttcagagaagttctgcactgatttttagtctcttgatgtctcaatcttacatgtataccaatcacaatggaataaagtgttgagttgtactgcccgggcggccgctcgaaaattccagcacgntggcgtccnt

SEQ ID NO: 513 - DNA, 1936 bp, Homo sapiens
gcccacgcgtccggtaaaaagcccccaaatcgccctggaatcacttttgagattggtgctcgtttggaggcactggactacttacaaaaatggtatccatcacgaattgaaaaaattgactatgaggagggcaagatgttggtccattttgagcgctggagtcatcgttatgatgagtggatttactgggatagcaatagattgcgaccccttgaragaccagcactaagaaaagaagggctaaaagatgaggaagatttctttgattttaaagctggagaagaagttctggctcgttggacagactgtcgctattaccctgccaagattgaagcaattaacaaagaaggaacatttacagttcagttttatgatggagtaattcgttgtttaaaaagaatgcacattaaagccatgcccgaggatgctaaggggcaggattggatagctttagtcaaagcagctgctgcagctgcagccaagaacaaaacagggagtaaacctcgaaccagcgctaacagcaataaagataaggataaagatgagagaaagtggtttaaagtaccttcaaagaaggaggaaacttcaacttgtatagccacaccagacgtagagaagaaggaagatctgcctacatctagtgaaacatttggacttcatgtagagaacgttccaaagatggtctttccacagccagagagcacattatcaaacaagaggaaaaataatcaaggcaactcgtttcaggcaaagagagctcgacttaacaagattactggtttgttggcatccaaagctgttggggttgatggtgctgaaaaaaaggaagactacaatgaaacagctccaatgctggagcaggcgatttcacctaaacctcaaagtcagaaaaaaaatgaagctgacattagcagttctgccaacactcagaaacctgcactgttatcctcaactttgtcttcagggaaggctcgcagcaagaaatgcaaacatgaatctggagattcttctgggtgtataaaaccccctaaatcaccactttccccagaattaatacaagtcgaggatttgacgcttgtatctcagctttcttcttcagtgataaataaaactagtcctccacagcctgtgaatccccctagacctttcaagcatagtgagcggagaagaagatctcagcgtttagccaccttacccatgcctgatgattctgtagaaaaggtttcttctccctctccagccactgatgggaaagtattctccatcagttctcaaaatcagcaagaatcttcagtaccagaggtgcctgatgttgcacatttgccacttgagaagctgggaccctgtctccctcttgacttaagtcgtggttcagaagttacagcaccggtagcctcagattcctcttaccgtaatgaatgtcccagggcagaaaaagaggatacacagatgcttccaaatccttcttccaaagcaatagctgatggaagaggagctccagcagcagcaggaatatcgaaaacagaaaaaaaagtgaaattggaagacaaaagctcaacagcatttggtaagagaaaagaaaaagataaggaaagaagagagaagagagacaaagatcactacagaccaaaacagaagaagaagaaaaaaaagaaaaagaaatctaagcaacatgactattcagactatgaagacagttccctygaatttttggaaaggtgctcttctccactaactcgatcttctgggagttctctggcttcacgaagcatgtttacggagaaaactacaacctatcagtacccaagggcaattctatccgktgatcttagtggtgaaagtatgtgtaaccatgtgatggttaaaacaagacttacaattcctaaatgtgtaactgagaataaaacgtactctgttaagagcatgcgatttaaaa

SEQ ID NO: 514 - DNA, 1177 bp, Homo sapiens
  misc feature (24): n equals a,t,g, or c
cctggtcatatactcttggcatanctttttttcctttggctttgcatggcttttycttcaggtactgtctcggtatcattctgctaatcattgttacagaatggtgacttcatttgtgctaacagtacaacagcagatttgggtcaggcttaatctaagtgttaacttttttttctggtgcttttttggattgatgactgtctcactttgactatacccatgttttgcatgcaatgactcatgcatggttttcttaactagctaatattaacaatttattccatataaaaatggaattttgcaacatcctttaataaggtgagggaagcatgaacctcagacttctggcactattacatagtaagcacatgaagtagtttgataataaatagcagttctagtacttcacatttcacccgtgtgtgcaatgcctttttctggggggtggggggtgagggaaaacctggtagtgaatgtgtagttggggaataaagaaaagcactaaatcctgccctttttgtgtggtttccttttgatacaactaggttattcataatgtatacctagaaaagtgaaattgaaaataccaaaagatgtatcatttttatttgaatccatcatgcagtgtacatttcagataatttccttcagtctccagataggagtgtatccaaacatctaattttatgtgcactgtgtatcttatatgaatgttttattttatataccacatgcaaaaatgtccatatgcactatttaaatgttttaaataatatattccttctttataatgctaaatctatatgagtaccatatttttataagtcagtggtctgactggtttcattttagaattaacagctgcttcaatatgttattcaatgttaatgtttggctgtgagtagaatatgtaaaagtggcatggcagcacttatgctctgtgacagtattgtgtgtcatagttgagcagtagctggtagaattaggcagttggtgatagttttactttggtacaaataaaaactgtatatctatatacaaataatatatagatatatatgtccaccagtataatggcattgctgtgtctggcacttcattgtacagacttttataataaaagaacttgaaagttctaaaaaaaaaaaaaaaaaaaaaaaaaaaaaagggggggggg

SEQ ID NO: 515 - DNA, 932 bp, Homo sapiens
  misc feature (864): n equals a,t,g, or c
  misc feature (880): n equals a,t,g, or c
  misc feature (911): n equals a,t,g, or c
  misc feature (912): n equals a,t,g, or c
  misc feature (921): n equals a,t,g, or c
ctggcaggtcccagaaggtggcgagtttcgcggccagaggcttacaggtccaggtggagaggccgggctggccagggcttcggcctccggcgtcgggaaatggcggcggggggcaggatggaggacggttccttggatatcacccagagtattgaagacgacccacttctggatgcccagcttctcccacaccactcattacaagctcactttagaccccgattccatcctcttcctacagtcatcatagtgaatcttctgtggtttattcatctcgtgtttgttgttttagcatttttaacaggtgtgctttgttcttatcctaatccaaatgaggacaagtgcccaggaaattacacaaacccattgaaagttcagacggttataatccttgggaaagttattttgtggattctccatttactccttgaatgctacatccagtatyaccacagsaaaatcagaaaccgaggstataacttgatctaccgatcaacaaggcatctcaagagacttgcgttgatgatacagtcctctggcaacacagtgcttctcctcatactgtgcatgcagcactccttcccagagcctggcagattgtatcttgacctcattctggccatcttggcactggaactcatctgttccctgatatgtctcctcatttacacagtgaaaatcccggagatttaataaagctaaaccagagcctgatatacttgaagaagaaaaaatctatgcttaccccagcaatattaccttcgggagactgggattcagaactattttcaagcctagaaagaaaattggtgaaaaagcaagggagacaccattgaataccttgaaggcgacacaatgcgctgntgaagtaagcgaatgntggctcttactttcctcagaccttgggctgnnaagccagtngaacgtgaaga

SEQ ID NO: 516 - DNA, 1159 bp, Homo sapiens
tttttttttttttttttccattatttttasgcagaagggaaaaaagccctttaaatctcttcggaacctgaagatagaccttgatttaacagcagagggcgatcttaacataataatggctctggctgagaaaattaaaccaggcctacactcttttatctttggaagacctttctacactagtgtgcaagaacgagatgttctaatgactttttaaatgtgtaacttaataagcctattccatcacaatcatgatcgctggtaaagtagctcagtggtgtggggaaacgttcccctggatcatactccagaattctgctctcagcaattgcagttaagtaagttacactacagttctcacaagagcctgtgaggggatgtcaggtgcatcattacattgggtgtctcttttcctagatttatgcttttgggatacagacctatgtttacaatataataaatattattgctatcttttaaagatataataataggatgtaaacttgaccacaactactgtttttttgaaatacatgattcatggtttacatgtgtcaaggtgaaatctgagttggcttttacagatagttgactttctatcttttggcattctttggtgtgtagaattactgtaatacttctgcaatcaactgaaaactagagcctttaaatgatttcaattccacagaaagaaagtgagcttgaacataggatgagctttagaaagaaaattgatcaagcagatgtttaattggaattgattattagatcctactttgtggatttagtccctgggattcagtctgtagaaatgtctaatagttctctatagtccttgttcctggtgaaccacagttagggtgttttgtttattttattgttcttgctattgttgatattctatgtagttgagctctgtaaaaggaaattgtattttatgttttagtaattgttgccaactttttaaattaattttcattatttttgagccaaattgaaatgtgcaccycctgtgccttttttctccttagaaaatctaattacttggaacaagttcagatttcactggtcagtcattttcatcttgttttcttcttgctaagtcttaccatgtacctcggccgcgaccacgctaagccgaattccagcacacgggcgg

SEQ ID NO: 517 - DNA, 2451 bp, Homo sapiens
tgaatacaatagcgtcaatgccaacatgatcgctactctcttcactagtcttctcctgaggcctccacccaaccttatggcaagacagactccaagtgaccgccagcgtgctattcagttccttctgggctttctgcttgggagcgaagaagactaaggcttttactgttctctgatrttctagaagcagacsatmtcgggctccaagtatttcagaatgatttaaaaagtcatgccacaggaagggtctattgcagaatttcaagttctgtttatagtaaaaaggaagagcgtttcctaatccctcctttaccatatcctacacagaaaaatacttttagacttatattgccaagccaaagttaccatattttggtgtttttgtgttttctctttataaggcaaaaagatctgtatttacactccttcacctagggatgtgtttgttgccctcctacccaattgtcatgattgtccttagtaccctaggcctagattctgagatcttcccattctaggcctacaagcactacttgctgtagctgagacttgtctagagtcctttgttttgcacttttgacccaccccttcctggatcactcctttgcactccactcccctcgttctgtcactttgaacgaagtctgagtgaggctagtgactccttgggtgtcctcaacagtgaattcactgtctgcgtgcagttattacatgcatttgtgcatttctactacaatggcatctttatgtctctgtaacattggccttttcatggctccacactgggtggaaccatattctcttagatcacatttagtagcataactgtagggactattagagatggcatctcatcgatgagagagaatcacaatcagaatggaagcactttgagtatctgaagagtgagagcattcatgtttgacaggtcctgcttcccactatccttttcctgttattattcaaattttacacaaggactaatcctgggtgtctctgagacccatctcctgcctagacatccacctccagagcaacactggccccacagtaaaagaggaagtcttgtacctcaggcaggcccatctagagctattgctccttcccacagcaaaggtattgtggatgacccttagaatccattctctggtcttctgaaataccaagggcagatgtcacctccttcctcagcaggactgactctgggctctacaaccagctccttcacataaagggtttagagactccccttggctcccagtcaccatatccagtgttgtgtaaagagactggccaacaggaccaaccaagcaccttacctctcccatacaagatgaccctctgagcttttcatttattcaagctctgtggtacagcctttttttaaaataaattaatctatattggttgacaaacaagccaccaaccactgactgcaaaactgcctgatgcagttgggttcctcctggttttcttttgttacaaccacccttgcctgtttacattaattgcaaggagcataacgtacaggctgtatgtacaatcctgggcattgactctgtgacatttctagcatatccaaggcaccaccagtgatttctcctgtttcttggtgggggtgggggggaaggtacgtattctgcaatatggctaaaccctttcctgattgagagttaaagcaataggagtcaagttactggtgccacagatctggaggtatgataggtcaggggctaggtgttgaacttagttaatggaagactgagagcagaacaggtttgtcatctccgcaagccagaaagtgatcacaaaaagaggcagatgatagacactggggtagggtcataccacagggaaatacctttcctgggcttgttttctagcatatcactgacctgggatctttgggtgatcaagggtgtggttagtggaggctctgtgctgcacgtatgcagtatcctatctctttctacatcagatcaaaacactaagttggtgtactgcctcgaccttttttcagctcatcctggaacatatacagagttgagagttttagacaatctctaggtagaggagacaagatgtagacccagacagaagaaatctgcttccctaccatggctattccagcaccccaacctgtaattgccaagtcctctaaggtactaatttgtagctgctctgaagtaaggatttcggattcagctggtagggaaagactctgcacctgctgtcttagggaagaaatggttcaaatccatgtggtgacattgcattagtctccctttcactgttttcttattctgtaattgtttgttatatttcccaaaaacgtcttgatcactaagcaaagctgctagtgggattctatatttcgtgtcatcttttttattataatttattgcaaatttttttctgaataaatatatgttgtgtgaaaaarmaaaaaaa

SEQ ID NO: 518 - DNA, 989 bp, Homo sapiens
  misc feature (336): n equals a,t,g, or c
  misc feature (871): n equals a,t,g, or c
  misc feature (891): n equals a,t,g, or c
  misc feature (910): n equals a,t,g, or c
  misc feature (913): n equals a,t,g, or c
  misc feature (926): n equals a,t,g, or c
  misc feature (947): n equals a,t,g, or c
cagtgcgcgccggggtcccgggtgcacagcctcaggataccccgtgcccgcagctcggggcccgcggaggcgatcagtgggtgaccgcggctgcsaggcgactttgtcatccgtcctccaggatctggggagaaagagccccatcccttctctctctgccaccatttcggacaccccgcaggactcgttttgggattcgcactgacttcaaggaaggacgcgaacccttctctgaccccagctcgggcggccacctgtctttgccgcggtgacccttctctcatgaccctgcggtgccttgagccctccgggaatggcggggaagggacgcggasncagtgggggaccgcggggtcggcggaggagccatccccgcaggcggcgcgtctggcgaaggccctgcgggagctcggtcagacaggatggtactggggaagtatgactgttaatgaagccaaagagaaattaaaagaggcaccagaaggaactttcttgattagagatagctcgcattcagactacctactaacaatatctgttaaaacatcagctggaccaactaatcttcgaatcgaataccaagacggaaaattcagattggactctatcatatgtgtcaaatccaagcttaaacaatttgacagtgtggttcatctgatcgactactatgttcagatgtgcaaggataagcggacaggtccagaagccccccggaacggcactgttcacctttatctgaccaaaccgctctacacgtcagcaccatctctgcagcatctctgtaggctcaccattaacaaatgtaccggtgccatctggggactgcctttaccaacaagactaaaagattacttgggaagaatataaattnccaggtccaggttccaatangagagaaaagaacttcttnaanggaatacttgaanaagtgggaaaggaacccaagnttgacacaggcttacttgaaatttgatatgccttgctgatca

SEQ ID NO: 519 - DNA, 3315 bp, Homo sapiens
ggcagagcggtcgacatgttccaggtcccggwtagcgagggcggccgcgccgctrccagggggtaaaggaagtggtatctttgacgaatcaacccccgtgcagactcgacagcacctgaacccacctggagggaagaccagcgacatttttgggtctccggtcactgccacttcacgcttggcacacccaaacaaacccaaggatcatgttttcttatgtgaaggagaagaaccaaaatcggatcttaaagctgcaaggagcatcccggctggagcagagccaggtgagaaaggcagcgccagaaaagcaggccccgccaaggagcaggagcccatgcccacagtcgacagccatgagccccggctggggccgcggcctcgctctcacaacaaggtcctgaacccaccgggaggcaaatccagcatctccttctactaagagaagccactgctccacccggagccagaccagaaactcaagagatagggtagccatgttttcatttccttttgcccaaatgagcggggtgggaagagggttagtcttatgtgagcctggctgctcagcgtctcctggccgtcatgacagctgcttggagacccgtgccttccagatggctgggagatgcctctgtggggatgaaatggggcacccctggccatcactcatgtgtagtccaggtttgagaggaactggaaggggggtgagggtggggaggtggggcagggcatggtccttggatcaacagcccgccagctgattggatgtctaggaatgactgaaagaaaccaaaacagcctgtccactgctgctgtgggatggaggaggcgtaagcagaaacactaacagtatattgacctcttagcagaaccgcttccattctggagatcacggctgctaaatccagcatccccacttcattttacccccagcatattgttctgtagtcttttcttgaaacatcttgattgcttttcctcggcagctttcaaaaaaccaaataataatagttatccgtcttctacttcatggaagattgttttggtgccctgaccctctgaagtgcccagttcctgccatctgaaacctcggcctgatctgatctcatgttggaatctgcctgtctttcacacagggctggtcttggtcctttacatgccagttttgcttgtgaattcttgcttttttcctctcatcagccttaagtttaggcgtttgttgttctccagtgatgtagacagttcccttcacaagtcacagttcttcccataaatgaggcccgctgacctctgcgggactttaaaaatctattcagatatttccgagtaagtggcttgtttaaattcttcctgtgtctttctttattccttaattggttggtggaaagaagagatgcttgggaaccttgggttcttaggtttggattctttaataatatctaaaaagctaaattttaaataccagctttacataaatgattgttgactctggtctgtttctgacacctttccagaaaaaagtcaattgttcaggtacaccaaagaggaagaagagctgtggaggccaccctctacaaagctttatagaacttctggatctaactcacaaacaagcttccagaagagactagagaccttaggccaggagatgaaggagttcagtagcaaagtcacacctgtccaattccctgagctttgctcactcagctaatgggatggcaaaggtggtggtgctttcatcttcaggcagaagcctctgcccatccccctcaagggctgcaggcccagttctcatgctgcccttgggtgggcatctgttaacagaggagaacgtctgggtggcggcagcagctttgctctgagtgcctacaaagctaatgcttggtgctagaaacatcatcattattaaacttcagaaaagcagcagccatgttcagtcaggctcatgctgcctcactgcttaagtgcctgcaggagccgcctgccaagctccccttcctacacctggcacactggggtctgcacaaggctttgtcaaccaaagacagcttcccccttttgattgcctgtagactttggagccaagaaacactctgtgtgactctacacacacttcaggtggtttgtgcttcaaagtcattgatgcaacttgaaaggaaacagtttaatggtggaaatgaactaccatttataacttctgtttttttattgagaaaatgattcacgaattccaaatcagattgccaggaagaaataggacgtgacggtactgggccctgtgattctcccagcccttgcagtccgctaggtgagaggaaaagctctttacttccgcccctggcagggacttctgggttatgggagaaaccagagatgggaatgaggaaaatatgaactacagcagaagcccctgggcagctgtgatggagcccctgacattactcttcttgcatctgtcctgccttctttccctctgcgaggcagtggggtgggattcagagtgcttagtctgctcactgggagaagaagagttcctgcgcatgcaagccctgctgtgtggctgtcgtttacatttgggaggtgtcctgtatgtctgtacgttggggactgcctgtatttggaagatttaaaaacctagcatcctgttctcaccctctaagctgcattgagaaatgactcgtctctgtatttgtattaagccttaacacttttcttaagtgcattcggtgccaacattttttagagctgtaccaaaacaaaaagcctgtactcacatcacaatgtcattttgataggagcgttttgttatttttacaaggcagaatggggtgtaacagttgaattaaacttagcaatcacgtgctcagagcttttgcctgtcagttgtgtgtgtcccttatagtcccttcccccacagctcttgctgaaagagtttgccttgttttgttttgttgttttgtatttagccagaggatgccaaaattagtcttctcaaagctttgagtagagtaagtgtgggaataagccagtttttttttttctgtttctgtaacttaaatgaacgggtttttttcccttgtatgccacttgtcctaacatgtccttaaggtgtttaacctgcctctgacctggcttgcaatgcatagggtgaggagaagcagagagcttgtcatatgcaagtcctgtcaagaaaacaggtggggcatgggtggcctcagggtttgtagtctttggggtctttggggaggccaggggtggggagggatccagtttgagctccagggagtttgagacccagcctagacaacatacttt

SEQ ID NO: 520 - DNA, 2361 bp, Homo sapiens
  misc feature (2121): n equals a,t,g, or c
gttaatccaatcattaatgcagtgtaagttatatgtgaaatgagtctttggtatttcatataggaattattttttttttcatttaaaacaaatccacatcttttgtaaaagccactgttttgaacacatttccttgaaaaatgttggtggtttttgtgattatttatttttttagatttcttttcttttgcactacaatttttggaatccttttggaaatactgtgtgactgctgtgttttgcagcatgaattatagtaaaatggtcttcaattcttaacaaatggacttccctgatgagaccaaaatggtgatttaacagtttttcttgtgtcccctaaaaagtggctctgcttcagaagtacttgccagtttttaatttatttgtgacttttcaccctaccctgctcccatataccttctaccatcagctgtcttgtttcatcatttctctgagattctgtgtgcagtgagcaatttttgtgtcagaaattctttgtcagaacaaatatatgtaacaggctcaacttactgtaaagctacttgtgttctcttcatttgtctgtaaaaatttccctaattgattatatagtgtaagaatagttgaagactagttgaagaccttttgtgatttcattatcatgcctatgcagaagaaaaatcattgaggaaaattgtcattagccagtttaactgattcaaactctgtttatttcatactaaactagtgaataagtgaaataaaggaaactcgtcattaatctaaagacagagttcaaaggaattgggccaaatatattctcagtatttggaactaatgtttttaaggtttttaggaaaatcaggtcatttaagaaattgttttgtagtttctggtttatagcagtcttcaagttttccatcttcactgtatgttgctgaaagtgaggatgaggatacagakttgatatttttagaaacagtaattttacttttaaggaaattggctagctctttgagctagagagctgtaggaagctcaacatttctttgtagagaacgttgctttttttggattgtacaggtataaaaacattgcttttgttgaattgtataggtgtaaaaagggaataactgtatgcaggtttgaaaaggaaatgtgctttaggcatgagtcataagatgccattgtacttgtaggcattttattttcctttagaaatggacatcagctcttctcttctgactggtaacacatagccccaaagcatgagattatttttcattgggtttttattgttgtttagttttggtttgttacgccagcccagtctgtctgcggaacactgactctgctctctaatgagaacaaagttagaaatctgccgataacctaaaataatttagaaatgaattaaaaatgtgaaatcgggttaaagtgatgatgataaaatagcatgcaagaaacaagctccttccatcagacttggctactgttttcttctggtacgatttggtttggaagagcctcttgtttccttctctttggggtatgtcttcgtttcttaatatgtttgtaacattattgagatataattcacataccttacaattcacttattttaagggtacaatttagtggtttttagtgtattcacaaagttgtgtaaccgtgaccacagtcaattttagaacatttcgttaccccaaaaagaaaccctgtacccttgagcagtcacctctcattttctcccagtgcccaccccatccccgagcccctggcaaccactaatctatttctctctctgtagatttgcttattctggtcatttcatataaatggaattctacaatattcggtcttttgggactggcttcccaaatatgattttctatatggagtgagaaaattcttctcatcttgagaactcttattgctgtgaaagggagtggttggtaaaatcaatagatttcaggcaagagggccagatacctaacaggtttttctccgtgaatcttatgctgagtagtttttcctcataaccaagcatttatgatatattactacttataatactgtggctagyctctagaatggatgttgaatcttgctctcagcgggaagatcggctaaaacgggctnaatcggccaaatcggccaatgcttgcaataattgcaagtgttcagtggctacttgcaggctgaactcggcagggcccgaattttgcatccggggtttgggttacagcccagataagggttggcggcaccgaatgctggagttttcggggcattcgggaaaagggcccctttgtagggccgttacggttagctgtccgataggcccctttccgcccgtgaaatgcaagtctcaagagtcga

SEQ ID NO: 521 - DNA, 2521 bp, Homo sapiens
  misc feature (1721): n equals a,t,g, or c
  misc feature (2477): n equals a,t,g, or c
  misc feature (2516): n equals a,t,g, or c
gtgggtcacgtgaaccacttttcgcgcgaaacctggttgttgctgtagtggcggagaggatcgtggtactgctatggcggaatcatcggaatccttcaccatggcatccagcccggcccagcgtcggcgaggcaatgatcctctcacctccagccctggccgaagctcccggcgtactgatgccctcacctccagccctggccgtgaccttccaccatttgaggatgagtccgaggggctcctaggcacagaggggcccctggaggaagaagaggatggagaggagctcattggagatggcatggaaagggactaccgcgccatcccagagctggacgcctatgaggccgagggactggctctggatgatgaggacgtagaggagctgacggccagtcagagggaggcagcagagcgggccatgcggcacgtgaccgggaggctggccggggcctgggccgcatgcgccgtgggctcctgtatgacagcgatgaggaggacgaggagcgccctgcccgcaagcgccgccagtggagcggccacggaggacggcgaggaggacgaggagatgatygagagcatcgagaacctggaggatctcaaaggccactctgtgcgcgagtgggtgagcatggcgggcccccggctggagatccaccaccgcttcaagaacttcctgcgcactcacgtcgacagccacggccacaacgtcttcaaggagcgyatcagcgacatgtgcaaagagaaccgtgagagcctggtggtgaactatgaggacactggcagccagggagcacgtgctggcctacttcctgcctgagcaccggcggacgtgctgcagatctttgatgaggctgccctggaggtggtactggccatgtaccccaagtacgaccgcatcaccaaccacatccatgtccgcatctcccacctgcctctggtggaggagctgcgctcgctgaggcagctgcatctgaaccagctgatccgcaccagtggggtggtgaccagctgcactggcgtcctgccccagctcagcatggtcaagtacaactgcaacaagtgcaatttcgtcctgggtcctttctgccagtcccagaaccaggaggtgaaaccaggctcctgtcctgagtgccagtcggccggcccctttgaggtcaacatggaggagaccatctatcagaactaccagcgtatccgaatccaggagagtccaggcaaagtggcggctggccggctgccccgctccaaggacgccattctcctcgcagatctggtggacagctgcaagccaggagacgagatagagctgactggcatctatcacaacaactatgatggctccctcaacactgccaatggcttccctgtctttgccactgtcatcctagccaaccacgtggccaagaaggacaacaaggttgctgtaggggaactgaccgatgaagatgtgaagatgatcactagcctctccaaggatcagcagatcggagagaagatctttgccagcattgctccttccatctatggtcatgaagacatcaagagaggcctggctctggccctgttcggaggggarcccaaaaacccaggtggcaagcacaaggtacgtggtgatatcaacgtgctcttgtgcggagaccctggcacagcgaagtcgcagtttctcaagtatattgagaaagtgtccagccgagccatcttcaccactggccaggggnmgtcggctgtgggcctcacggcgtatgtccagcggcaccctgtcagcagggagtggaccttggaggctggggccctggttctggctgaccgaggagtgtgtctcattgatgaatttgacaagatgaatgaccaggacagaaccagcatccatgaggccatggagcaacagagcatctccatctcgaaggctggcatcgtcacctccctgcaggctcgctgcacggtcattgctgccgccaaccccataggagggcgctacgacccctcgctgactttctctgagaacgtggacctcacagagcccatcatctcacgctttgacatcctgtgtgtggtgagggacaccgtggacccagtccaggacgagatgctggcccgcttcgtggtgggcagccacgtcagacaccaccccagcaacaaggaggaggaggggctggccaatggcagcgctgctgagcccgccatgcccaacacgtatggcgtggagcccctgccccaggaggtcctgaagaagtacatcatctacgccaaggagagggtccacccgaagctcaaccagatggaccaggacaaggtggccaagatgtacagtgacctgaggaaagaatctatggcgacaggcagcatccccattacggtgcggcacatcgagtccatgatccgcatggggagggcccacgsgcgcatccatctgcgggactatgtkratcgaagacgacgtcaacatgggccatccgcgtkratsytgrgagagntttmataggcacacagaakttcagcktyatgcgcaattnaaagg

SEQ ID NO: 522 - DNA, 1303 bp, Homo sapiens
  misc feature (1279): n equals a,t,g, or c
  misc feature (1286): n equals a,t,g, or c
caaaatccgcaaacagatcaacatcaataatccctttgttttcaaacacattagtaacctcaagagcatggatcattttgatgacattggtcccagtgttgtaatggcctccccaggcatgatgcaaagtggcttatccagagaattatttgaaagctggtgtactgataagaggaatggtgtcattatagcgggatactgtgtagaagggacacttgccaagcacatcatgtctgaacctgaagaaatcactactatgtctggacagaagttaccactgaaaatgtctgttgattacatttctttctcagctcacacggattaccagcaaaccagtgaatttattcgtgctttgaaaccgcctcatgtgattttagtccatggagaacagaatgaaatggccagattgaaagcagcactgattcgagaatatgaagataacgatgawgttcacatagaggttcataatcctcggaatacagaagcagtgaccttaaacttcagaggagaaaaactagccaaggttatgggatttttagcagacaaaaaaccagaacaaggccagcgggtctcaggaatacttgttaaaagaaactttaattatcacatactttctccttgcgacctgtccaattatactgacctggccatgagcacggtgaagcagacccaagccattccatatactggtccctttaatttgctctgttaccagctgcagaaattgacaggtgatgtggaagaattagaaattcaagaaaaacctgctctgaaagtgttcaaaaatattactgtaatacaagaaccaggcatggtggtattagaatggctggcaaacccttctaatgatatgtatgcagatacagtaacaactgtgatattggaagttcagtcaaatcccaaaataagaaaaggtgcagtacagaaggtttctaaaaaattagaaatgcacgtttacagcaagaggttggagatcatgctccaggacatatttggagaagactgtgtaagtgtaaaggatgactctattcttagcgtcacagtggacgggaaaactgccaaccttaacttggagacacggactgtagaatgtgaagagggaagtgaagacgatgaatccctccgagaaatggtggagctggctgcacagagactgtacgaggccctgacgccagttcactgagactgtgcctgtatatgaactttgaaaaaatacttgactctacttttgttacctaaaataaaatgcattcgtttctcwgggaaaaaaaaaaagttngccgaantttcccttgggggtatt

SEQ ID NO: 523 - DNA, 1100 bp, Homo sapiens
ggaggaaagtcagtgagcaaatcgcggaccaccggggctgccagctcgcctgactcccggcctcttgcgctcctaggggcggagaagggtgcgggctcttcgccctttgtgtcctccttctttcactaacttctggactttccagctcttccgaagttcgttcttgcgcaaagcccaaaggctggaaaaccgtccacgatgaccagcatgactcagtctctgcgggaggtgataaaggccatgaccaaggctcgcaattttgagagagttttgggaaagattactcttgtctctgctgctcctgggaaagtgatttgtgaaatgaaagtagaagaagagcataccaatgcaataggcactctccacggcggtttgacagccacgttagtagataacatatcaacaatggctctgctatgcacggaaaggggagcacccggagtcagtgtcgatatgaacataacgtacatgtcacctgcaaaattaggagaagatatagtgattacagcacatgttctgaagcaaggaaaaacacttgcatttacctctgtggatctgaccaacaaggccacaggaaaattaatagcacaaggaagacacacaaaacacctgggaaactgagagaacagcagaatgacctaaagaaacccaacaatgaatatcaagtatagatttgactcaaacaattgtaatttttgaaataaactagcaaaaccagaagcagctagaaatattcttggaggaaaaggacctggatatcaagtagggtaaaggtgggggtgtcttttttcactttaagcatcttgttttctaatcatgtgtgataattgggtgaaaaattcttagctcaaagtgttttaaaaacaggtaaagcaaagaaactagcaggaccactctcagttaagattaaaactaaagtccagtgttaagctaaaggagaaatagaaattaatggttctaattctgtttgggctgctaggaacaacagaaatttttcatggttctagaagctggaaagtcctgggtcaaggcccagcagatcctgttaggtgagggcccgcttcctggctcatagatggtgccttctcactgtgtggtga

SEQ ID NO: 524 - DNA, 1963 bp, Homo sapiens
atcagctcttctgcacattgcagtgaatgctttggtatgcggggagaaacactcttagggtgcyggtccttggcatgactcttgccattctaattggaattagtgccaccctcagcttggattttgaacaaggccttattctttcaggaagacaactaatggatgatagcaagttcatccacttactgggcttgtgccatgagcaaaattcaaagtcctgtatatctttcattgtagatttttaaatactccttttcctaaaaaactcaagggtttaaaaattgctattttatattttaaatgatattgagcagctacctacaatttctatgtacattttgttccccccccaccaccacccccaaattacgttccttttgacattttcctcatctgctgtttgtgacaagtcatcagccagatttcctgactgacacataggtatgatcagtgcaggagagacctgcgcaccacaggctgcaaactggaggttctgttctcatggcagtttgggcagtaacttttgagagaggccaaaaaaaggaggatgacatgctgtctcctctcttcagtatagacattaggctcttattcagaaaggatttttctttaaaaatgtacttactttactgaactacttacaggcacatttcttcataaggccacacctaatccaaacaagacagtctcccaacactgaagttccaaaataatccttaccactttgtaaaccatttatagctttgaaagtgttaagtgattccttcgttattatttatgcatgttcatgaacttctgctgtacattggaataggagttaacacattcacatttactgtctattttcttgtgtgccttatgagatggcttttctgactgtatctcaatagtctttctttctatgcaggtttataatcagtacaactactgttttctaaaatactactactcaaggctcggagtttgtatttaaattacactgaccaagtaacaatgtattccatttcaggaactgaatatttgactgttaacctttttcccatacgtccagtgtggcatggagcatatggacttgacagacatctctcacccagacgcccacgtgtgaacacacccacatccacatctctgggtggaaaccagcctagagtggggacgacgctaatggtgttgctttagaaccgtcttttcttacccttttagactcgtgttttgtatgagacaccattgcaagaaaattttatccctccagaagtattttattactaaagaacaaaagcaaaaaaagcttaaattgcactggttaaagtacagtttccaacagctgtccttcctcagtactctaatggccactccaccgcgagtggaagtcactgttgtgtgtacacaggtggtcccaatcaaaactccatcttttgagcccaattatgtccattttgttatagactaaatcaggggtttgttctacaagaacaatacatgttttaccctttcctttaactagaaggataactagtaatgcatcaacataatttctgtattaaccatcatgcgcacaagaaatacatagtaaataaggaagctgaaaactcctggcattggatcttaagctagatgattagaatgtgaaaaagattttacaaatgtaaaacttctatttctctgtagaaactttcttcactttgctgtgcaagaagacactgctttgctatatttaaaatggcttttttaaaagagatttatgtatttggtaaatgtttgtagtcaacagttcacacaagaagctgtacacggtttgatcatgtaaaaccgtttggcggcacaagctggactttgttgccatccttgagatgaaccttttaagaaaaataagttaatctcaatttttccctgaatgtgttgtttttcttcattatacaataaatataatagtgaactttttaaaaaaaaaaaaaaaaaaaaa

SEQ ID NO: 525 - DNA, 794 bp, Homo sapiens
  misc feature (782): n equals a,t,g, or c
aggagagtgggctctagcaggtggagatacactacgsctttgacacacttatagaatggtggagagaaaagaatggttccytttgttcccsgcttattatcgtattagacagcgaaaattcaaccccttgggtgaaagaagtgaggaaaattaatgaccagtatattgcagtgcaaggagcagagttgataaaaacagtagatattgaagaagctgacccgccacagctaggtgactttacaaaagactgggtagaatataactgcaactccagtaataacatctgctggactgaaaagggacgcacagtgaaagcagtatatggtgtgtcaaaacggtggagtgactacactctgcatttgccaacgggaagcgatgtggccaagcactggatgttacactttcctcgtattacatatcccctagtgcatttggcaaattggttatgcggtctgaaccttttttggatctgcaaaacttgttttaggtgcttgaaaagattaaaaatgagttggtttcttcctactgtgctggacacaggacaaggcttcaaacttgtcaaatcttaatttggaccccaaagcgggatattaataagcactcatactaccaattatcactaacttgccattttttgtatgctgtatttttatttgtggaaaataccttgctacttctgtagcctgctctcactttgyctttycttaaggtaattatgggaatataaggcsttggggaaaaacattttaatgaaaggtatgtaggggggtccaatgcttacngtaaatgcctaa

SEQ ID NO: 526 - DNA, 2599 bp, Homo sapiens
  misc feature (57): n equals a,t,g, or c
  misc feature (2410): n equals a,t,g, or c
  misc feature (2461): n equals a,t,g, or c
  misc feature (2475): n equals a,t,g, or c
  misc feature (2500): n equals a,t,g, or c
akcggccgsmtcgcatctcagctggttggctttggttagagctcccgtcagacyttngktcggscctaggatttggtagccccgaagtgtgggctctctccagtaccagactcatttcagtaccagcctttgggaagtcgtgtgaatacctcggtctcttagccacagggatagaatggcggcctgacggagccgcggcgccggcgaagtcgctgaggcgcgactggaacccccagaccagctcaaacgggagccaaaactcgaagcttggaagaattagcaggaaatggcggatgaggcgttgtttttgcttctccataacgagatggtgtctggagtgtacaagtccgcggacagggggaggtggaaaacggacgatgtattactaagctggaaaacatggggtttcgagtgggacaaggattgatagaaaggtttacaaaagatactgcaaggttcaaggatgagttagatatcatgaagttcatttgtaaagatttttggactacggtattcaagaaacaaatcgacaatctaaggacaaatcatcagggcatctatgtacttcaggacaacaaatttcgcctgcttactcagatgtctgcaggaaaacagtatttagaacatgcatctaagtatttagcatttacgtgtggcttaatcagaggtggcttatcaaacttgggaataaaaagtattgtaacagctgaagtgtcttcaatgcctgcttgcaaatttcaggtgatgatacagaagctgtagaacatactgaaatgcaaggcttcaacagtgtaaagagataaattattcatgtaaaagtatttcaagtagtgatgatttaattacattgttcgatgtttgtacaggagtaagcatgtatttttatcaatttaacacagatcaaaggagatgaagggacattctgccatgacatacacttaaccaaaactattcaaaatgaaaaccggatttcaaataaccagacaccaagatgcagggcccttattttaaacctttttatttggttagagtgatatgtatttagccatagatggagaaacaaagctcagggtttgttgaattagcatgagagaaaattatgtaccaacagaattatttgtgagaagaatgaacaaattttgataaagtatgaatttgttttattttaaaaagcaaacatactaaattttttttattttattgcttataatttattaagaatgtttacacctgtataaggatttcatatatacattgtatgtgtgtatatataaatacatatatgactgcctaaattgtttataaatttaatttttctttaataggttcattccttcagagctccattaatgtaatcaaaatgaaatatagattagtttaaatgtgaattcagtgactctagggccaaagaatattaggtatgtttggaaagaatttttgtatttattcctgttacagttttgactttcaacttctctccccgtgcatggaagtcctggtaaaggatctaacatctttattcccttctttcctcttccagctgagcagarttggataattgaattagtcattctgacattctttggaccatatcatcttagtggtttggggtcagtgctcatctgatatatctttcttaccacctcttctacttactttctcttacttaaattatctggcataagcagttatctccagcttttgttagaatcttgcatgttgattactaaaactatactttgtttcccatttatttattacccttttgcatgtatttgtgtgacagggaactctgcagcagggggtgactgacacaccaaacaagatgtttcactgggtactctgccatagaaatggcagattaagaagattgactataccaaacattatattaaaaacacaraataaaaactataaaaatgtactttaggacattaaagaaaactcaagttagaagcataccattttcctttcatggaagggtacagtattacaaagataatttgtttaacttgatttattaaattctagttatgtgccctataatgatgtttcagtcagtgacagacctcatatatggcagtggttccataagattacaatactgtatttttactgtaccttctttatgtttagatatgcaagtacttaccattgtgttacagtgtcctacagtattcactacaataatatgctgtacaggtttgtagcctaggagcaataggccatagcttaggtgtatagtagatcataccatctaggtttgtgtaagtacactctgtgattgtacaattttaaaatctcctaatgatgatgcatttctcagaatgtatcccctttgctaagcaatgcatgactgcaatcctaattctcacatgttttggggraaaaattttaattttgaaaaaanttaggaaagttcctacyaaatatacatgtataaagtttattaaaagtcatnaatgacccakggankakctmatggacacagaagttaganccaaaatagaacacaatagaggaacttccaaaatgaaaacaggtgtggagaaatgtgtgtgtggaaaaagccggggttccaaataagttgggtttggtt

SEQ ID NO: 527 - DNA, 1305 bp, Homo sapiens
  misc feature (1293): n equals a,t,g, or c
aattcggcacagccacactggacagggcagctgctgggttgctactctcgcctccgccatgattccgcccgcagactctttgctcaagtacgacaccccagtgctggtgagccggaacacggagaaacggagccccaaggctcggctactgaaagtcagcccccagcagcctggaccttcaggttcagccccacagccacccaagaccaagctcccctcaactccctgtgtcccagatcctacaaagcaggcagaagaaatcttgaatgccatactacccccaagggagtgggtggaagacacgcagctatggatccagcaggtgtccagcacccctagcaccaggatggacgtggtgcacctccaggagcagttagacttaaagctgcagcagcggcaggccagggaaacaggcatctgccctgtccgcagggaactctactcacagtgttttgatgagttgatccgggaggtcaccatcaactgtgcggagagggggctgctgctgctgcgagtccgggacgagatccgcatgaccatcgctgcctaccagaccctgtacgagagcagcgtggcgtttggcatgaggaaggcactgcaggctgagcaggggaagtcagacatggagaggaaaatcgcagaattggagacggaaaagagagacctggagaggcaagtgaacgagcagaaggcaaaatgtgaagccactgagaagcgggagagcgagaggcggcaggtggaggagaagaagcacaatgaggagattcagttcctgaagcgaacaaatcagcagctgaaggcccaactggaaggcattattgcaccaaagaagtgataatttccacatgattaatttccaacaagacacytgggagttatttactgtgttcctctggcagccaataaaatcatcataagccctttgtaataaaaagctagtttcctgagtgaacaagccataacctcccctaaacaccacctaggtatttgttagaagtcacactattactccaatgtcatcagacacctaaggtctgccagccaggctcctggctggcaatggaagatggtgtggccctgttagtctccgtgtgtggcttactagccagccttgggaactgccaactcaaattctaagaaagccactgctttctcatcatcactctataccaatacttatttctggccaaatgaatctgcttctctgcccctcaaacttttagttcacaattcatcttctaccttaacttggggsttcttggggcctctggctttccttaattaaatgtcttntttttccctact

SEQ ID NO: 528 - DNA, 1631 bp, Homo sapiens
  misc feature (1628): n equals a,t,g, or c
gaggcctgcggcggcagsgagcggcgggactgggagcgggcgcgggagccgacccgagccgagccgagccgagccgagccggagcgggcggcgaaggccggcgcggcgagcagcaaccatgtcggtgttcgggaagctgttcggggctggagggggtaaggccggcaagggcggcccgaccccccaggaggccatccagcggctgcgggacacggaagagatgttaagcaagaaacaggagttcctggagaagaaaatcgagcaggagctgacggccgccaagaagcacggcaccaaaaacaagcgcgcggccctccaggcactgaagcgtaagaagaggtatgagaagcagctggcgcagatcgacggcacattatcaaccatcgagttccagcgggaggccctggagaatgccaacaccaacaccgaggtgctcaagaacatgggctatgccgccaaggccatgaaggcggcccatgacaacatggacatcgataaagttgatgagttaatgcaggacattgctgaccagcaagaacttgcagaggagatttcaacagcaatttcgaaacctgtagggtttggagaagagtttgacgaggatgagctcatggcggaattagaagaactagaacaggaggaactagacaagaatttgctggaaatcagtggacccgaaacagtccctctaccaaatgttccctctatagccctaccatcaaaacccgccaagaagaaagaagaggaggacgacgacatgaaggaattggagaactgggctggatccatgtaatggggtccagcgctggctgggcccagacagactgtggtggcctgcgcagcgagcaggcgtgtgcgtgtgtggggcaggcaggatgtggtgcaggcaggttccatcgctttcgactctcactccaaagcagtagggccgcgttgctgctcactctctgcatagcatggtctgcacctgggagatgggcggggggaggggggcgggcggggtgggaagtgcctgctgtttataatgttgaatttctgtaaaataaactgtatttgcaaatccaacattgagcttctggactacgctgactccactgctgaatcctcaatggaaagggtcgactggttgcagttgaaatgacctgaaatgtagcctctgtccttgtaagtcagttgacttgccgcacatctctttgtgtacttgtacggtactggcagaaaagtcatttttcaaaagccataggcttttccttgcccttagctgtaataatgcatctgattttgatttcctccagagctgtgtttctgtccatcacctgtgtattggccctgtgtttaccactctggcccactcctcacccccttgctcccctggtcttctggagtttgtgacattgatttgaaatggatggtgttctcttgagagcaagtgagattgttagaattaagttccaactatacagttttctaacatagctataaggtccttgttgctgtttgtgataactgatagataactcattggaaacgtgcatacatttatattcagatgaaattatggtttgcactgtctattaaatatctcgattaattttcawaaaaaaaaaaaaaaaaaacccggggggggnccc

SEQ ID NO: 529 - DNA, 1944 bp, Homo sapiens
  misc feature (568): n equals a,t,g, or c
cgcaccctgccttccgggggccggacagggcccgggctgctgtctcaagacagccagacaaggagttctccttcatggatgaggaggaggaggatgaaatccgtgtgtgaggcggacagtgggtggccaccgggagctcttggctgcatcttctccctgcccccaccccactatgacctttgaccctacggcgcaggggcagccaggacccttgattcagaccatggaccctggaccttgtagatgagggacactggcctggccctcgggtcttcggaggacgtagggggctggcatgggtgccgactggctgcctgacttcatcatgctccctgcacttaggctgcgtgggacaagggctgtgttgtcacagcaggaataggttttcctctgttggcctccctttcctccaccctggcctcaaatggatgccagatgccaaccccagttctggccacgtacagccagcgggtcagcccagaggcagcctcagctccagggctaaggactctcggytcccattttctytgctggcgtttctgctgtgcccagcagtggctgctggggnaagcagctgcagcaggagggagacggtcttgcctctcagcccctccctgccccaccccagctcctgccctggaaatctggagccccttggagctgagctggacggggggccagctgcgagcatgtgcactaaacgcagccctttccaggggaagagaacaggatggagaatggaaggaaagccccccaggcttcgtgaattgcaagaagggacccttccaggatgacactaggaacagggctagggcactcgctcagtccctaggggcttgtttgttctttattattgtgtttaaatccttatagagcaatatcaggatggtgttaataggtctgcctcagaatgagaatcaatccttttagaaaacctttatactaagcctcctcttcraaattcacagtggcgattagcggactggagtctggtggcgattagcggactggagtctggggacatccgtggcaaagacaccagctcaactttagtgcttcccaactttatttagaatgacatggggtgggtgtctggtgtgtgtgttttccctacgcacctcccatagctattaacaactgaggaaggccagtgcagaatatttttggagaacgattttttttttaaataatatatcattcctatggggggaaagccttttttttctttttggctgagttattccctccctcccctcaataccctcagtactgactacttccctttcttttctcaggcctccccccaccgacttttgaggccagggttggccagatttagcaaaaccaaaacagagtgctgagttaaacgcaaatttcaggtaaacaaaagataattttctagcattaatatgccccacgcaatatttggaacacttatgtgaaaaatgatttgtttttctgaaattyacgtttctctctgagtcctgtaactgtccccgaggggattgagcagaagctcgggtatgagccctgaggttgactgccggttatttttctgtcctgggaacagcctgacccacctccctgtctccatgtagccagtgrggggagggggagacacagaaccaaccacagccaggggcgtccccatggcgactgtggcccggcccctcctctcttgcctgactctcctctcttgcctgactctagacactaacttagttccaggttcggtgccctgttggtgctcctgtttccaatagcttaggtcccatggtgggggaggaacctcagggctatgcagcccccgccagctgccctcraatcccgtccaggccarttccagattctaaactgatttttttcatgatattgtcaaaacagtgaggaaacattaaaaaaaaagccctaaagcaaaaaaaaaaaaaaaaaaaaaaaaaaaaa

SEQ ID NO: 530 - DNA, 1425 bp, Homo sapiens
  misc feature (1409): n equals a,t,g, or c
  misc feature (1411): n equals a,t,g, or c
ggcacgagtgacggaagtgcctctatcttgttgccggraagtgggaagagagaaaggttgtgatggcggctatagctgcatccgaggtgctggtggacagcgcggaggaggggtccctcgctgcggcggcggagctggccgctcagaagcgcgaacagagactgcgcaaattccgggagctgcacctgatgcggaatgaagctcgtaaattaaatcaccaggaagttgtggaagaagataaaagactaaaattacctgcaaattgggaagccaaaaaagctcgtttggagtgggaactaaaggaagaggaaaagaaaaaggaatgtgcggcaagaggagaagactatgagaaagtgaagttgctggagatcagtgcagaagatgcagaaagatgggagaggaaaaagaagaggaaaaaccctgatctgggattttcagattatgctgctgcccagttacgccagtatcatcggttgaccaagcagatcaaacctgacatggaaacatatgagagactgagagaaaaacatggagaagagtttttcccaacatccaatagtcttcttcatggaacacatgtgccttccacagaggaaattgacaggatggtcatagatctggaaaaacagattgaaaaacgagacaaatatagccggagacgtccttataatgatgatgcagatatcgactacattaatgaaaggaatgccaaattcaacaagaaagctgaaagattctatgggaaatacacagctgaaattaaacagaatttggaaagaggaacagctgtctaatcccttcaagaactgtttatagaagcttgagaatggggtaaaaatttctgctagcaaaatcaagttctttttgaaattttatcagtaatccagaatttagtagtccatgccttctcactcagcatttagaaataaaaatgtggtttcttaaacgtatatcctttcatgtatatttccacatttttgtgcttggatataagatgtatttcttgtagtgaagttgttttgtaatctactttgtatacattctaattatattatttttctatgtattttaaatgtatatggctgtttaatctttgaagcattttgggcttaagattgccagcagcacacatcagatgcagtcattgttgctatcagtgtggaatttgatagagtctagactcgggccacttggagttgtgtactccaaagctaaggacagtgatgaggaagatggcagtggccaccggaggactggagcagtccctcctcatggcggcctgtgaccaaggtcggggaggagtggagctatccttccatgatctgatcatgtacagttccctttttaaaaagcaataaatgcttgggattagaatttcaaaaaaaaaaaaaaactcggggggggccccntnccccattggccctt

SEQ ID NO: 531 - DNA, 1466 bp, Homo sapiens
tggtggaggaccttttggaaacttgtggttcccccgggctgcaggaattcggcacgaatgctggggtgcagcttcaagcttaggaccacccaccatgcctatccaggtgctgaagggcctgaccatcactcattaagaacagaggaggctgcctgttactcctggtgttgcatccctccagacactctgctgtttcctgcctaggcgtggctgcagccatggctaggaaagcgctgccacccacccacctgggccagagctggttctgctcctgctgcagggacactgagctggctatctcggcgcttcgggcaagaactgcaacaggctctcctgggtcctgcaggtgtacagccgggcccctgccttgtgcctcagctctcgagagctgctgctgccgggtgacctgatccaacctgataaggtgccatcttcagctaccactgcaaggccctgagggcaacagcagcacggcactgcccacccggctgctgatggcctggtgccagctgggagtcctcccggcacttcgaggccactgagccacccttccagccccagcccaccatggacaggggtatccagcttcctcctcaacctcgtcctctgcccctgagccagtgacgcccaaggacatgcctgttacccaggtcctgtaccagcactagctggtcaagggcatgacagtgctggaggccgtcttggagatccaggccatcactggcagcaggctgctctccatggtgccagggcccgccaggccaccaggctcatgctgggacccaacccagtgcacaaggacttggctgctgagccacacacccaggagaaggtggataagtgggctaccaagggcttcctgcaggctaggggaggagccacccccgcttccctattgtgaccaggcctatggggaggagctgtccatacgccaccgtgagacctgggcctggctctcaaggacagacaccgcctggcctggtgctccaggggtgaagcaggccagaatcctgggggagctgctcctggtttgagctgcattcaggaagtgcgggacatggtaggggaggcaaaaagccttgggcactaccctccctgtggagctgttcggtgtccgtcgagctagccacaccctgacaccatgttcaagggtaccggaagagaagggtgtctgcccccaacctcccctgtgggtgtcactggccagatgtcatgagggaagcaggccttgtgagtggacactgaccatgagtccctggggggagtgatcccccaggcatcgtgtgccatgttgcacttctgcccaggcagcagggtgggtgggtaccatgggtgcccacccctccaccacatggggccccaaagcactgcaggccaagcagggcaaccccacacccttgacataaaagcatcttgaagcttttaaaaaaaaaaaaaaaaaaaaaaaaaaaaaaaaaaaaaaaaaa

SEQ ID NO: 532 - DNA, 1658 bp, Homo sapiens
gctcgtgccgattcggcacgagatggaggcagcggtagcccagtgtctgagtggttgccgggtctccatggagaagcggctcgccagtgtcccaggctgctgagctctcgccgcccgagaccccgcggcgcggccgcagggccatgctagccttgcgcgtggcgcgcggctcgtggggggccctgcgcggcgccgcttgggctccgggaacgcggccgagtaagcgascgcctgctgggccctgctgccgcccgtgccctgctgcttgggctgcctggccgaacgctggaggctgcgtccggccgctcttggcttgcggctgcccgggatcgkccagcggaaccactgttcgggcgcggggaaggcggctcccaggccagcggyaykgcgggcgccgctgccgaagccccgggcgkccagtggggcccggcgagcacccccagcctgtatgaaaacccatggacaatcccgaatatgttgtcaatgacgagaattggcttggccccagttctgggctatttgattattgaagaagattttaatattgcactaggagtttttgctttagctggactaacagatttgttggatggatttattgctcgaaactgggccaatcaaagatcagctttgggaagtgctcttgatccacttgctgataaaatacttatcagtatcttatatgttagcttgacctatgcagatcttattccagttccacttacttacatgatcatttcgagagatgtaatgttgattgctgctgttttttatgtcagataccgaactcttccaacaccacgaacacttgccaagtatttcaatccttgctatgccactgctaggttaaaaccaacattcatcagcaaggtgaatacagcagtccagttaatcttggtggcagcttctttggcagctccagttttcaactatgctgacagcatttatcttcagatactatggtgttttacagctttcaccacagctgcatcagcttatagttactatcattatggccggaagactgttcaggtgataaaagactgatgaaagtcatccctcactgttagtaaggaagcagtatacatcaatgggaacagggcccatggaaatgtacaggagtttccctattttggtgttcagcttgaaaaaggacttgtcagaatcaactgtgtcatcaaaatttaagtaatgtgcattgaaaataaggttgatcatgggaatatgcagaatttccaatgtatttttaaatacaaataaaattgtaatttagaatttttaaatcttaggtttcttgattaatttataagagatcaattattgtcagtcttttttgtatgttttttaaaaacatagtccagagcatgggcagaattgacacctctcttttaagtgaaatttggattgctcacaaagcactaggaaatgtcatggggttcaaatatatatccyacacaactgggcaatacatttttgtttgatttttaggtctgtgtatacattaacagttcatgtaattaatacckgatcatttgggataatgaaagtgaagttagttgtagatgaagtaaagttataaaagagattaaaaatgatcaggtattaattacatgaactgttaatgaatccaggttccaatatcaacaaacattgctatg

SEQ ID NO: 533 - DNA, 2857 bp, Homo sapiens
ggcacgagcctttctgaagattaaaaaacaaataaaaagttgagaagaaagagcacgaagagtagaagggaacaatggtgtactcgccagcaatggcaatacgggttattaaaaagaagggtgggggcggggaaccctggccgactcaggacgccacgggaggaagccacgcaaaatagcaaaccgggatcctagaggggcggggcccacctcagcgcgcaggcgcaaccaggcccaggtggccgccgcggaagcgaaccacctatacgcgccgcgccgcttgggtctcctgcgcatgcgcagacasctgcgctggaggcttcatctttgccgccgctgccgtcgccttcctgggattggagtctcgagctttcttcgttcgttcgycggcgggttcgcgcccttctcgcgcctcggggctgcgaggctggggaaggggttggagggggctgttgatcgccgcgtttaagttgcgctcggggcggccatgtcggccggcgaggtcgagcgcctagtgtcggagctgagcggcgggaccggaggggatgaggaggaagagtggctctatggcgatgaaaatgaagttgaaaggccagaagaagaaaatgccagtgctaatcctccatctggaattgaagatgaaactgctgaaaatggtgtaccaaaaccgaaagtgactgagaccgaagatgatagtgatagtgacagcgatgatgatgaagatgatgttcatgtcactataggagacattaaaacgggagcaccacagtatgggagttatggtacagcacctgtaaatcttaacatcaagacagggggaagagtttatggaactacagggacaaaagtcaaaggagtagaccttgatgcacctggaagcattaatggagttccactcttagaggtagatttggattcttttgaagataaaccatggcgtaaacctggtgctgatctttctgattattttaattatgggtttaatgaagatacctggaaagcttactgtgaaaaacaaaagaggatacgaatgggacttgaagttataccagtaacctctactacaaataaaattacggtacagcagggaagaactggaaactcagagaaagaaactgcccttccatctacaaaagctgagtttacttctcctccttctttgttcaagactgggcttccaccgagcaggagattacctggggcaattgatgttatcggtcagactataactatcagccgagtagaaggcaggcgacgggcaaatgagaacagcaacatacaggtcctttctgaaagatctgctactgaagtagacaacaattttagcaaaccacctccgtttttccctccaggagctcctcccactcaccttccacctcctccatttcttccacctcctccgactgtcagcactgctccacctctgattccaccaccgggttttcctcctccaccaggcgctccacctccatctcttataccaacaatagaaagtggacattcctctggttatgatagtcgttctgcacgtgcatttccatatggcaatgttgcctttccccatcttcctggttctgctccttcgtggcctagtcttgtggacaccagcaagcagtgggactattatgccagaagagagaaagaccgagatagagagagagacagagacagagagcgagaccgtgatcgggacagagaaagagaacgcaccagagagagagagagggagcgtgatcacagtcctacaccaagtgttttcaacagcgatgaagaacgatacagatacagggaatatgcagaaagaggttatgagcgtcacagagcaagtcgagaaaaagaagaacgacatagagaaagacgacacagggagaaagaggaaaccagacataagtcttctcgaagtaatagtagacgtcgccatgaaagtgaagaaggagatagtcacaggagacacaaacacaaaaaatctaaaagaagcaaagaaggaaaagaagcgggcagtgagcctgcccctgaacaggagagcaccgaagctacacctgcagaataggcatggttttggccttttgtgtatattagtaccagaagtagatactataaatcttgttatttttctggataatgtttaagaaatttaccttaaatcttgttctgtttgttagtatgaaaagttaactttttttccaaaataaaagagtgaatttttcatgttaagttaaaaatctttgtcttgtactatttcaaaaataaaaagacagcaatgactttatatccaagaaaggaatgtgaatgagtcacttaacagggaatctaaagagctgtgttagctgtgtacatacacagattatctgagaaaaggtcaagggttccacttgggccacagtttttttgttaatcaaacaccactctcttaagaggctgcaccacaaaaggcaacaaagggcccctctaaggcttgagattaaaactagtctttatcattactgctgtgacactcttgcttagtatattaagagactcatacatttttgatatcacaactttttgatggcttttcaatattctaaatttgggttcctggtgaaaccaaatggggtacactttcatatccaaattaataaaacctataaggcatctgggtggcctctatgaaataaattaattacccatagtgtagtttctaggaggcatgtgtacacacactcttcattgtggcacaaatttaaatcgcctcatgaccatgtctgtgagccagggtcaagctggtttggccttcttgsatgcattttccaaggcccactggtrggagcagccatggagtttttyatacagttacttaacgkttgtgggaataaaa

SEQ ID NO: 534 - DNA, 1335 bp, Homo sapiens
  misc feature (35): n equals a,t,g, or c
  misc feature (1334): n equals a,t,g, or c
atttcccatcttagataatggtccgtcccggcaanactttgagattggacaagaagatgttactaaagagaagttcctttaaaaggtcttgttcttgtgtcaaaaagctgcaagtttggtttgttctcgtgtgtgatcatgagtgcacaatgaagaagaccctagatgctgcattttttagctctgaagattccttaggtatccctgaagacagctcgctcagatgatcagcatttagagtgaaaacaagggcccttcatgggtgaacattagaaagagccagggttcaaagctggcgaatggatgacgcaccctagccactggcccctctctgtttcatgtatttccaaaagttgtaaactttgatggctgatttttcgtaagtcaggtttctaagtgagctccctgaggtgccaaggccatggtgtccgccctgctgcgtctgttcgtcagctgagttccttgtgaatctctgttttagggtttggggctagtgtgtttgtgtttccattctaagattgagtctggcagtccctgtttttttgcattggggtaactgctctttgattttttttaattgcagtatttgtgtgattgcaataataaagtttggtttggtttttacagtcatgcgcagggacgatccttgttctctgctgtaaactgtaaaaagtttatggagacttaaagtcttgatgttgtgaagcagaggttattttgtggaaagattaaaaggattttgttggtacctggttttgtgttgtgtatatatacatgaggttgaacagtgaaaggaaagttcagtagtgatgttagaagggtaactatgacaaagatacttttgagataacatttaaaagtactttatattttacataatagcatgtttcattttgattaaaagctaccaaaggaattttgatcatggcataagtgtttaaagcaatattttctggaatataccaagtttatataatttgattttgtgctaaattattaagagtctctttttgaaacatgcgggtttgaaatatgacaccttgtgggtttccatattaaaatcctcactctttaattgtcatttctatctttgaaaattttcatttatgagttccatgatatgtggtctaagaaagaccaaacagatttctatttttttttcttataagttcgttgtgtctagagattgttaatattgtaatttaatgtagacttactttgaataaaattagtttaattggccttaaaattacattaataaaactttgtgatatgcaaaaaaaaaaaaaaaaaaaaaaaaaaaaaaaaaaaaaaaaaaaaaaaaaaaaaaaaana

SEQ ID NO: 535 - DNA, 2818 bp, Homo sapiens
gggaagtggtggtaagggaatgactgtatttccactagcatattatgcctgcatttcttgctttagattgtgaaagtcaccatggatatccatttgaatgaaatggctggagacatcttggtttttctgactggccagtttgaaatagaaaaaagttgtgagttactttttcagatggcagagtctgttgattatgattatgatgttcaagataccaccctccgatggcttgttaatattgccgtgttatggatcaatgacaacagatcaacagaggargatatttttgccaccaccacctggaattaraaaatgtgtcatatccaccaatatttctgcaacgtctttgacaatagatggaatcagatatgtggtagatggtggcttcgtgaagcagttaaatcacaaccccagattagggttggacatcctggaggtggttccaatttcaaagagcgaggcattacagcgaagtggccgagctggcaggacttcttcaggaaaatgctttcggatctatagtaaagattttkggaaccagtgtatgcctgaccatgtgatccctgaaattaagagaactagtttgacatctgtagttctgaccttaaagtgccttgccatacrcgatgtcataaggtttcccyatttggatccacctaatgagagacttattttagaagctcttaaacaactttaccagtgtgatgctattgacaggagtggccatgtcaccagattgggtttgtctatggtggagtttcctttgcctccacatctgacatgtgcagtaataaaagctgcttccctggattgtgaagatctactacttccaatagcagcaatgttgtctgtggaaaacgtcttcattagacctgttgatccagagtaccagaaggaagcagaacagagacatcgagaattggcagctaaagctggaggatttaatgactttgcaactttagctgtcatctttgaacaatgcaaatcaagtggagctccagcttcatggtgccaaaaacactggattcattggaggtgcttattttctgcatttcgtgtggaagctcaacttcgagaactaatcaggaagcttaaacagcaaagtgattcccaaaagagacctttgaaggccctaaacatgaagtactacgaagatgtctttgtgcgggctatttcaaaaatgtagctcgaagatctgttgggagaacgttttgcacaatggatggtcgtggaagcccagttcacattcatccttcctcagcacttcatgaacaggaaaccaaacttgaatggatcatttttcatgaggtattggttaccaccaaagtctacgcaagaattgtatgcccaatccgttatgaatgggtaagagacttgttacccaagttgcatgaatttaatgcacatgatttgagcagtgtggcccgacgtgaagtgagagaagatgcaagaaggagatggacaaataaggaaaatgtaaagcagctaaaggatggaatatcgaaagacgtcttaaagaaaatgcaaagaagaaatgatgacaaatccatatctgatgcacgggctcgtttccttgagagaaagcagcagaggacccaggaccacagtgacacacgaaaggaaacaggctaaggtggtgaaccctccaattcaggaagtgggaaaaggagccaggaaatgtgcttctactttgccagttatttcagacagcactaccaagaggaggtggtcagcacttgttattggcctatgaactaaaagcaaatcaaagctcataaatcaaagctcatcagttcccataaatgcagttgtcaaagaaaagatttggttgccatagtcataagcaatgatacatgaaaccaatgaaagacagtacatgtaataatattttcctcagtacaattttgctggccttaactggtatcaaacgctgtcattgagatgttttcaaagaacattgagttgtatttaatcagcgtgtactccatttgcattgaagcattaaaaattatttttcttaaaatctctttaaggccttcttgttgctgttagaatagtgctatatatcaggtatgtgaccatttatttcagaaggctgaacataagaggtttctactcagcaatacttagatgtctaactgtttaattgctacagagctttatagatatttagagaaaagacttaatcaattagtaaataaaattgcctatggcaggattctttcttgaattaatattaatccttaaattgatttttctgggattatacaaattcctttttatataaaagtatattgtttaaaacagtagctatagccattaaccaaaggacagatgatatatatatatatgatatatatatatatataagttcttttttagctgtacctacgtacttatatcagcaccatgtatgtaggtgtgatagtactttcaaacagcgcctccacctggcctactctgttatttccacctgtttgggtagggccatttaacttccattatgccaaacttgggatgggattttcgaagcagacaacactatttcatcgtgtttcaaattggaaccttgaggctagttagtatcacactcaggccacactcagcacttgcccactcttgtttactgccttgtattctagttatttgtgtatttgtctccctcactagattatacgctccttgtgggcagggactgtgtcttttttcatctttgtatctttcatgcacctagcatagtgctttgcacatagtagtcactcagtgtttgttaaataaagctattagtgtcattaaaattcaaaagmcarwaaaaaaa

SEQ ID NO: 536 - DNA, 1397 bp, Homo sapiens
ctcatttaggtgacactatagaaggtacgcctgcaggtaccggttccggaattcccgggtcgacccacgcgtcckaggcgggatggtgccgctgtgccaggttgaagtattgtattttgcaaaaagtgctgaaataacaggagttcgttcagagaccatttctgtgcctcaagaaataaaagcgttgcagctgtggaaggagatagaaactcgacatcctggattggctgatgttagaaatcagataatatttgctgttcgtcaagaatatgtcgagcttggagatcagctcctcgtgcttcagcctggagacgaaattgccgttatcccccccattagtggaggatagtgcttttgagccatctaggaaagatatggatgaagttgaagagaaatctaaagatgttataaactttactgccgagaaactttcagtagatgaagtctcacagttggtgatttctccgctctgtggtgcaatatccctatttgtagggactacaagaaataactttgaagggaaaaaagtcattagcttagaatatgaagcatatctacccatggcggaaaatgaagtcagaaagatttgtagtgacattaggcagaaatggccagtcaaacacatagcagtgttccatagacttggcttggttccagtgtcagaagcaagcataatcattgctgtgtcctcagcccacagagctgcatctcttgaagctgtgagctatgccattgatactttaaaagccaaggtgcccatatggaaaaaggaaatatacgaagagtcatcaacttggaaaggaaacaaagagtgcttttgggcatccaacagttaatcacttatgtttttagagcatgcaatcttaactttgttaaactattattattgatcacattttgatttttttctctccacatcaggatagtttactgaagcacaatctcttatactagtgggacaaaagggagaaaaaggaagcaagataaatgggtatgtaggatgaagggttatttaaaatggaactaaagatagaaggaggactgtaggaagaaatggaataatttaaatgtgaggaaagatatctgtggtagacatgtccttccatgactaatttctaattgtaactcaacacacattgaggtatgggccctcctcagtgactttaactagctcagaaacgtactcccccaccaaccccacctcaccgccccccatcccggttctgggagagcattgttattaaggatgcatgacaggaatgttggcagaactggaaagtattaaaaaagcattatcagacagtcttgatattatacattttcagaaatatattaaaaataataaactaaaacccatgatttcaaaagtttaaaaaaaaaaaaaggcggccgcaagc

SEQ ID NO: 537 - DNA, 1233 bp, Homo sapiens
  misc feature (1111): n equals a,t,g, or c
  misc feature (1122): n equals a,t,g, or c
  misc feature (1137): n equals a,t,g, or c
  misc feature (1202): n equals a,t,g, or c
ctgattctgaagacaatcctcagactttacttttttctgcaacttgcccacagtgggtatacaaagttgcaaaaaaatacatgaaatccagatatgaacaggttgascttgttggaaaaatgactcaaaaggctgcaactactgtggaacatttggccatccagtgtcattggtctcagaggccagcagttattggagatgtccttcaagtctacagtgggtctgaagggagggctattattttctgtgagaccaagaagaatgtaactgaaatggccatgaatccacacataaaacagaatgcccagtgtttacatggggacattgcacagtcacaaagagaaattacactaaaaggcttcagagaaggtagttttaaagttttggtggcaaccaatgtggctgcccgtggtttggacattcctgaagttgacctggtgattcaaagttctcctcctcaggatgttgagtcctatatccatcgctctggacgcacaggtagagctggacggacagggatttgtatatgtttttatcaaccaagagaaagaggtcaactaagatatgtggaacaaaaagcaggaattacttttaaacgtgtaggtgttccttctacaatggatttagttaaatctaaaagcatggatgccatcaggtctctggcttccgtttcttatgctgctgttgattttttccgaccatcagctcagagactgatagaagagaaaggtgcagtggatgcattggctgcagctttagcccacatttctggtgcatcaagctttgaaccacgatctttgatcacctctgataaggggtttgtgaccatgactctggaaagcctagaggaaatacaggatgtcagctgtgcttggaaagaacttaacagaaagctgagtagtaatgcagtgtctcagattaccagaatgtgcctcctgaaaggraatatgggtgtttgctttgatgttcctacaactgagtcagaaaggttacaggcagagtggcatgattccgactggatactctcagtgccagccaaattacctgaaattgaagaatattatgatggaaacacatcttctaattccagacagaggagtggctggtcaantggtcgatcangccggtcagcgkgtncaggtggtcgatctggcggcggtcagtagacagatcgacaaggagtcgctcaggaatcgacaagnggtagagagatgggaatagaatcgatcaaga

SEQ ID NO: 538 - DNA, 1016 bp, Homo sapiens
  misc feature (147): n equals a,t,g, or c
acaggtgcgtgccaccacgcccagctaaattttgtatttttagtggagacggggtttcaccatgttggccaggatggtctcaatctcctgaccctgcgatctgcccacctcagcctcccaaagtgctgggattacaggcgtaacacncgggcctggcctgttttatgattcttaatagttacttggtttaaatcacatttgatactatccttctgaaaagtctgagacagatctacaaactacagtcaaaattatagattaagaggaatgaatgcacctatttggctttaagttgaagatgaattatttctcatgctcattttcttgcggcagttatcttagaaagacccccaaaggctttgtgattgtaagcactgtcatgatcacagaatgcaagcttctggtaccatgatcctcaacttagagaggaagaaaccaagacagagagcttaactcacttctctcagggaaaattaggagttgagcacaggacaggaaatgggctttgccacttttagctccaggcttttctaaccagacttgatttcctcatgttctagaaagatcactaatggtcaagtggaacaagcactacacgactaacccctattggggtttttaacttaagggaggctaatttttaatttaaactgctcgagatatgagttctgcaaaaggtggtccgcatccttggccctctggacattatcactaaattgcttgtgcctgttaacaagaatactgaccagaatgctcttcatgtagcttatacagttggttcacttcatgcggttcttgacatgtttatttctacccttaatgcaatgaaatgtttcattaataaaaaaccactttatataaaattgctctagaagtcatatgtcattggatgtcctgttgtttatggagtttccctggaaagatgttccttgacagatgcagccctgagtcacacacttgggccatgtctgatctagagttcgctgtagtggacagttacaatcagccctcgtgcc

SEQ ID NO: 539 - DNA, 1679 bp, Homo sapiens
ggcacgagcggatgggcgggacgggcgtggaggacgccgagcaccgtggcgcgcgctcacgtccgcgtccccaagggctgcgctccctcaagcgcagtgcccagaactcggagccagcccggcccgggggaccctgctggccaaggaggtcgtcagtccggtcttgtcttccagacccggaggaccgaagcttccggacgacgaggaaccgcccaacatggcctcggagagtgggaagctttggggtggccggtttgtgggtgcagtggaccccatcatggagaagttcaacgcgtccattgcctacgaccggcacctttgggaggtggatgttcaaggcagcaaagcctacagcaggggcctggagaaggcagggctcctcaccaaggccgagatggaccagatactccatggcctagacaaggtggctgaggagtgggcccagggcaccttcaaactgaactccaatgatgaggacatccacacagccaatgagcgccgcctgaaggagctcattggtgcaacggcagggaagctgcacacgggacggagccggaatgaccaggtggtcacagacctcaggctgtggatgcggcagacctgctccacgctctcgggcctcctctgggagctcattaggaccatggtggatcgggcagaggcggaacgtgatgttctcttcccggggtacacccatttgcagagggcccagcccatccgctggagccactggattctgagccacgccgtggcactgacccgagactctgagcggctgctggaggtgcggaagcggatcaatgtcctgcccctggggagtggggccattgcaggcaatcccctgggtgtggaccgagagctgctccgagcagaactcaactttggggccatcactctcaacagcatggatgccactagtgagcgggactttgtggccgagttcctgttctgggcttcgctgtgcatgacccatctcagcaggatggccgaggacctcatcctctactgcaccaaggaattcagcttcgtgcagctctcagatgcctacagcacgggaagcagcctgatgccccagaagaaaaaccccgacagtttggagctgatccggagcaaggctgggcgtgtgtttgggcggtgtgccgggctcctgatgaccctcaagggacttcccagcacctacaacaaagacttacaggaggacaaggaagctgtgtttgaagtgtcagacactatgagtgccgtgctccaggtggccactggcgtcatctctacgctgcagattcaccaagagaacatgggacaggctctcagccccgacatgctggccactgaccttgcctattacctggtccgcaaagggatgccattccgccaggcccacgaggcctccgggaaagctgtgttcatggccgagaccaagggggtcgccctcaaccagctgtcactgcaggagctgcagaccatcagccccctgttctcgggcgacgtgatctgcgtgtgggactacgggcacagtgtggagcagtatggtgccctgggcgcactgcgcgctccagcgtcgactggcagatccgccaggtgcgggcgctactgcaggcacagcaggcctaggtcctcccacacctgccccctaataaagtgggcgcgagaggaaaaaaaaaaaaraaaaaaaaagttct

SEQ ID NO: 540 - DNA, 1080 bp, Homo sapiens
  misc feature (970): n equals a,t,g, or c
  misc feature (978): n equals a,t,g, or c
  misc feature (1027): n equals a,t,g, or c
  misc feature (1044): n equals a,t,g, or c
  misc feature (1067): n equals a,t,g, or c
aaaatgtataaaacgcccattttcctgaatgaagtcttggtgaactgcccacagacccttccagcgatgagcctgtcttccacatttcccacattgatcgggtctacaccctccgaacagacaacattaatgagaggaccacctgggtgcagaagatcaaggcggcgtctgagcagtacatcgacaccgagaagaagaagcgtgagaaagcttaccaagcccgctcccaaaagacttcaggcattgggcgcctgatggtgcatgtcattgaagctacagaattaaaagcctgcaaaccaaatggaaagagcaacccatactgtgaaatcagcatgggctcccagagctacaccaccaggaccatccaggacacactcaatcccaagtggaattttaactgccagttctttattaaggatctctaccaagacgtgctgtgtctcaccctgtttgacagagaccagttttcaccagatgatttcctgggtcgtactgaaattccagtggcaaaaattcgaacagaacaggaaagcaaaggccctatgacccgccgactgctgctgcatgaggtccccaccggggaggtctgggtccgttttgacctgcagctttttgagcaaaaaactctcctgtaggggttctaaaggacagcaccagcgggacagcccacaaggctggggctggagaatgagagactgcgctctcttggggctgagggagcaccatgcagcttcacccctcacaaagccatgcacgctgggggctctgttttcctgcacactaaatagctagcaatctatgcaaacacctttcccataaagaaaccaaaccccatagtacagtgccttgtcctagtgttcacatgttcagctctgtttgtttagatgccaaggtttccattttcagggctataaaaagtattacttgggaaatgagggcatcagaccaccagatgttaccgytcggttgnaatgtgtnccaccgtggagtkggtttgggtgacgctgttaaccattccacgccatgnaccctcttgctggggtncacagcccatttcagggaggggnaagggttcaggtt

SEQ ID NO: 541 - DNA, 2259 bp, Homo sapiens
  misc feature (2213): n equals a,t,g, or c
  misc feature (2242): n equals a,t,g, or c
  misc feature (2247): n equals a,t,g, or c
  misc feature (2250): n equals a,t,g, or c
  misc feature (2253): n equals a,t,g, or c
ccgcagcccatctgctggcatcaktacctggtgttgggacagcaggataggkttctaaaggtggttttytatccaaacgaccaaaaaaccaacagtaacaccagtgaaaccccacactgtcgggcttataaaaatctgtgccatcatggtgattttatccaagactgctccacttaccccagtgctggggacaagtttctgttgaaactttagatagcagaattatttgcaatttgtagcatagaaaagatttttaaatttttttacaaaaggtttttaaacagattagggtaggtgatggtttaaatcaattaagtggcattggaaacctagggtttccttttgattaagagccttttttgtttctgctctttgtcagctttcaggggagaaggaggccactggaaaattatttccctaagtgcaggctgttgactgcgtatgccaaaaagggacaggaggcatgggatagcaggtctggtgacacagctagggtcttcctagcagctcctcctcctccctcccaaggcccccaggaatcccttcctcccatgtcctggcagcaggaccccaggctacatatggaaggtagagatgtgggggtcctgtrtcctggagtattatgtctccccaccttctgcagttttctctgaacatgtatgttgcccatggtgggagcgtggtcactgtgcagttgtgcacagatgtctttcctttaccgttggcctttctgtctgcctctccttcctctctgcagcccaaatggaaaacaattatttactccattggagggaaaggaagagtcttagaattcctaagggaaccttagcataaaggttttggggaaggaggccgtaggcsccggaggaagcaattccacttggtttgacaacttctgccactcccatgtcagatgacttgcacttcttaaagagattgctttataacactaagacatcctttctaaagattcaagtggacttgactaagctgagggtccacgaaatagaatatgacatgtgagctgtttttggaaaacgaagatggagagagcacttccccgtaacgaaagcaaagtggtaagcacagggtgagacccttttacacagaatggtggagagaaaagagaatgctgaaaagtggctcagatgcagagtgttctgtggagaaactgcagccccacttctgtttccctggagtctcccaatggatcattcaggagtgtcctatgtgagaattgagccaaggaaaatactcatgcaaccagcctgagtcgcggtgaggggacgagaggttgtacacacattggtagttattttgcaccagcagtgcctttctcactgggggtacttggaccctcagatcttcttttctaatagccatttgccaccccaagtggtatgtcggccatttctccttaaaacaccttccctacctttcccatgtactcagtttagctctcaaagaaggggtgaatcataaagccagtgaaaatttcaccctctgagggagttccccaatctgaaggggaagagggtgacctcagcggcttttctcccaaaaatcggctgaaggctggttgtggatccttgttcctctcctgaccccatctggctgctgccccgtctcccacccctgtccccggggctcgctggccctgcactccgccttagtcctggggccggcgacacagtgggggctcctcacttgctgcagtgtcatagcaataaaatgtgattcttggggtccccccagggagctgcccatggctttatttatgaacctggttttcgggagtcaggggaggagatgactttgcttctgtgcacagccccgtcttccaggagccacgactcagaagaaaagggtgctcagacttttgttatacacatttgctttgtgtaaataaatgtttacaattttatatgaaagatggaataagcgctagagcttccaactgtatattttttacttttatagattttaaaactatgatcctttatatgtgtgttttgggggagctatgataagttttatggcaaacggttggtattgttaactttttattgtcatcaaaagttcataaaagtcctattaatccccatattcttctactgcccttaactctggtatacaccaaaaagaaatctttactttccttgttttatcattataaaaataaagtattttgctagtatggaaaaaacctttgnatttgacgtcacctggggtctgctggcanaaagnttnggngaatgg

SEQ ID NO: 542 - DNA, 1347 bp, Homo sapiens
  misc feature (1290): n equals a,t,g, or c
tcgacccacgcgtccgggcggcgcggacagcgttcggkgctgtgtgccggcgcctctggcagggattggggaatttttctgtaaacacttctaagggcaatacagccaaaaatggtggcttgcttctcagtaccaatatgaagtgggtacagttttcaaacctacacgttgatgttccaaaggatttgaccaaacctgtggtaacaatctctgatgaaccagacatattatataagcgcctctcggttttggtgaaaggtcacgataaggctgtattggacagttatgaatattttgctgtgcttgctgctaaagaacttggtatctctattaaagtacatgaacctccaaggaaaatagagcgatttactcttctccaatcagtgcatatttacaagaagcacagagttcagtatgaaatgagaacactttacagatgtttagagttagaacatctaactggaagcacagcagatgtctacttggaatatattcagcgaaacttacctgaaggggttgccatggaagtaacaaagacacaattagaacagttaccagaacacatcaaggagccaatctgggaaacactatcagaagaaaaagaagaaagcaagtcataaagcctcagggaggccatttttgcctaaatttgaaatgagggtgggccagatgagtatgtttaagtggagagtgcttccagctgagatgatttgagtctgycctaactgctccattgagttctcgtgccctcatcagctgagggcagggaatggaactttaatggaagaaccacttttatctattctttttattcattgtttcagttctgatttcagcaaacatgagcaaaccactttgactgaaagcagaaagagtgaaaattctattttgttacgctactggtgttcaattattagtttgtaccatttttaatttatgtcagttgatgcatctgaaaataagtgcttggagtgttcgtacccttatttttttttaagattcctagaaggaatctttggttaattcagattgagcagttaaagtttttgctatttacctttgtgcaggctggcatatgctaatttgggggtggtaaccaaccgattttatctcatgtaagcattacattttgaagactgaatatacttcacagcagatcaaacacatttatggcatgcactgacctcttcttggagcccagaactttatagagttgcctaccagggttactgtaatggaatttatgatcttaagaaattactagttgtattatttatcctatgattcatncattcaataagcttttactgcataaactttacattcagcactgtagttaagtaccca

SEQ ID NO: 543 - DNA, 1901 bp, Homo sapiens
ggacaaattaaggatgaaactcttcaggctgcagttagagaaattttggccctaattggctatgtggatccagtgaaagggagaggaatccgaattctctcaattgatggtggaggaacaaggggcgtggttgctctccagaccctacgaaaattagttgaacttactcagaagccagttcatcagctctttgattacatttgtggtgtaagcacaggtgccatattagctttcatgttggggttgtttcatatgcccttggatgaatgtgaggaactttatcgaaaattaggatcagatgtattttcacaaaatgtcattgttggaacagtaaaaatgagttggagccatgcattttatgacagtcaaacatgggaaaacattcttaaggataggatgggatctgcactgatgattgaaacagcaagaaaccccacatgtcctaaggtagctgctgtaagtaccatagtaaatagagggataacacccaaagcttttgtgttcagaaactatggtcattttcctggaatcaactctcattatttgggaggctgtcagtataaaatgtggcaggccattagagcctcatctgctgctccaggctactttgcagaatatgcattgggaaatgatcttcatcaagatggaggtttgcttctgaataacccttcggcattagctatgcatgagtgtaaatgtctttggccagatgtgccgttagagtgcatagtatccctgggcactggacgttatgagagtgatgtgagaaacacggtaacatacacaagcttgaaaactaaactttctaatgttatcaacagtgctacagatacagaagaagtccatataatgcttgatggcctgttacctcctgacacctattttagattcaatcctgtaatgtgtgaaaacatacctctagatgaaagtcgaaatgaaaagctggatcagctgcagttggaagggttgaaatacatagaaagaaatgaacaaaaaatgaaaaaagttgcaaaaatattaagtcaagaaaaaacaactctgcagaaaattaatgattggataaaattaaaaactgatatgtatgaaggacttccattcttttcaaaattgtgatgagtatatgcttatgttctcataaatgaaggtctgtttagaagatcaaccacattcaataaggaattgtggggttcgacatgagttaactttgaaatacgtatgaattctggagaatcctgaaaaagacggtgcttcaaccagcttgcatagcacagagaatattcttggttacagaattcatatgggaactaggcttttaagatgttaataattagctaagctttagtaacccttactgtgctagtagattttagtagatattggtgttatattgtttgatgtttgaaaatatattaatatatgtgccgaacaagaaaccgaaagctatattgtactgtgtatttttactttagtcctcataatcatgttgaatttatgtgatcattgattttatttcatatggaaaagctaatttcttcttaaatttacattacctaatattctcactagctatgttctccaatccacactgccttttattgtaatatcatctaaatagatgcagaaaaatggaattttctctattaaagtattttacatttgacataaaaaagaaccagatacagttttctattcagatatgtttattttaacattgtttggttaaaaaaggtgaagttccagtcaaccactttttacccctgaaatttcaagataatgctatattaacttttccagatctaacactagcttattcttccctgttataaaatggtttgaacttactgaggagatattcctatcattaacaaaaataaactatttaaataawaaaaaagtcgacg

SEQ ID NO: 544 - DNA, 842 bp, Homo sapiens
ctgacagtaccggtccggaattcccgggtcgacccacgcgtccgaacagtgttctaactattaacgctacgatgcctgaacctaccaagtctgctcctgccccaaagaagggctccaagaaggcggtgactaaggctcagaagaaggacgggaagaagcgcaagcgcagccgcaaggagagctattcagtgtatgtgtacaaggtgctgaagcaggtccatcccgacaccggcatctcttccaaggcaatggggatcatgaattccttcgtcaacgacatcttcgagcgcatcgcaggcgaggcttcccgcctggcgcattacaacaagcgctcgaccatcacctccagggagatccagacggccgtgcgcctgctgcttccgggggagctggccaagcacgccgtgtcggagggcaccaaggccgtcaccaagtacaccagttccaagtaactttgccaagggagagacatgaagacagaggagaaatgaatgcataaaataactgataatatgaatctatacatagaacttaggaagtctcatctgcctgaaaatgactgtgtggatcccacccaaatccaactcatcctggtttgctgcacactggttcatcaaaagaaggttaccgaggggaaggaactaaaggtgtttgcacttcatgttactttttgagtttataaacataaaaacagaatttacttctgttacagacctagttactgggaattcattacttgccatggactacctttgctaagaaaagtctgaatgagaagatggcaggacgtctgaaaaaaaaagttataattaataaaatctgcggagaattgtaaaaaaaaa

SEQ ID NO: 545 - DNA, 778 bp, Homo sapiens
  misc feature (641): n equals a,t,g, or c
  misc feature (652): n equals a,t,g, or c
tcgacccacgcgtccgtacttttccccctaccctgctcctcctcctccacagccgtctttctctttgcctcagccacttccttccttcgcctcaccctccccagtgcactgaagaaggtaaccgggtccagacccacgcggcgccagttctccggcgggaaggaaaaccgcgcagagaggcagcaatgaatgtggatcacgaggttaacctcttagtggaggaaattcatcgtttgggttcaaaaaatgctgatggaaagttaagcgtgaaatttggggtcctcttccgtgatgataaatgtgccaacctctttgaagcattggtaggaactcttaaagctgcaaaacgaaggaagattgtaacatatccaggagagctgcttctgcaaggtgttcatgatgatgttgacattatattactgcaagattaatgtggtttacatatctttatgtactgccattttttgtttctggtaaactggaatataaagtgaaagaacaaacatttgaacatacttaatgtatttttatagaactttgtaaacgaaaggagattcatgttttagaagtctgtccttttttatatcttgaaagaaaatctatgtatgatgctataaaataaatcctattattttctmagnatmtggttganattctgcgaaagcaacawgcaaactgaagaccaactcctatgagaaatattatgatgtttatgtaataaagacatgtaactgtcttaaawwwaaaaaaaaaaaaaaaaaaaaaaaaaaaaaaaaaa

SEQ ID NO: 546 - DNA, 2142 bp, Homo sapiens
  misc feature (32): n equals a,t,g, or c
  misc feature (225): n equals a,t,g, or c
  misc feature (619): n equals a,t,g, or c
gaccttttggagttagaaaaggtccacgattngtgcgataacttctgccaccgatacattagctgtttgaaggggaaaatgcccatcgacmtcgtcattgatgaaagagacggcagctccaagtcagatcatgaagaactttcaggctcctccacaaatctcgctgaccataacccttcttcttggcgagaccacgatgatgcaacctcaacccactcagcaggncaccccagggccctccagtgggggccatgcttcccagagcggagacaacagcagtgagcaaggggatggtttagacaacagtgtagcttcacctggtacagtgaccgatgatgatccggataaggacaaaaaacgccagaagaaaagaggcattttccccaaagtagcaacaaatatcatgagagcatggctcttccagcatctcacacatccgtacccttccgaagagcagaagaaacagttagcgcaagacacaggacttacaattctccaagtaaacaactggtttattaatgccagaagaagaatagtacagcccatgattgaccagtcaaatcgagcaggttttcttcttgatccttcagtgagccaaggagcagcatatagtccaganggtcagcccatggggagctttgtgttggatggtcascaacacatggggatccggcctgcaggtttgcagagcatgccaggggactacgtttctcagggtggtcctatgggaatgagtatkgcacagccaagttacactcctccccagatgaccccacaccctactcaattaagacatggacccccaatgcattcatatttgccaagccatccccaccacccagccatgatgatgcacggaggaccccctacccaccctggaatgactatgtcagcacagagccccacaatgttaaattctgtagatcccaatgttggcggacaggttatggacattcatgcccaatagtataagggaactcaagggaaaaggaaacacacgcaaaaactattttaagactttctgaactttgaccagatgttgacacttaatatgaaattccagacagctgtgattattttttacttttgtcatttttcatcaagcaacagaggaccaatgcaacaagaacacaaatgtgaaatcatgggctgactgagacaattctgtccatgtaaagatcctctggaaaaagactccgagagttataactactgtagtataaatataggaactaagttaaacttgtacatttctgttgatcacgccgttatgttgcctcaaatagttttagaagagaaaaaaaaatatatccttgttttccacactatgtgtgttgttcccaaaagaatgactgttttggttcatcagtgaattcaccatccaggagagactgtggtatatattttaaacctgttgggccaatgagaaaagaaccacactggagatcatgatgaacttttggctgaacctcatcactcgaactccagcttcaagaatgtgttttcatgcccggcctttgttcctccataaatgtgtcctttagtttcaaacagatctttatagttcgtgcttcataagccaattcttattattatttttgggggactcttcttcaaagagcttgccaatgaagatttaaagacagagcaggagcttcttccaggagttctgagccttggttgtggacaaaacaatcttaagttgggcagctttcctcaacacaaaaaaagttattaatggtcattgaaccataactaggactttatcagaaactcaaagcttgggggataaaaaggagcaagagaatactgtaacaaacttcgtacagagttcggtctattaattgtttcatgttagatattctatgtgtttacctcaattgaaaaaaaaaagaatgtttttgctagtatcagatctgctgtggaattggtattgtatgtccatgaattcttcttttctcagcacgtgttcctcactagaagaaaatgctgttacctttaagctttgtcaaatttacattaaaatacttgtatgaggactgtgacgttatgttaaaaaaaaaaggtgttaagtcacaaaaagcggtaataaatatttcatttttgaaaaaaaaaaaaaaaaaaaaaaaaaaaaaaactcga

SEQ ID NO: 547 - DNA, 1893 bp, Homo sapiens
cagtaccggtccggaattcccgggtcgacccacgcgtccgataatttataagcattgccattgaaggcttaattgactgaaattactttaacattttggaaattgttgtatatcactaaaagcatgaattggaactgcaatgaaagtcaaatttactttaaaaagaaattaatatggcttcaccaagaagcaaagttcaacttatttcataattgcctacatttatcatggtcctgaatgtagcgtgtaagcttgtgtttcttgggcagtctttcttgaaattgaagaggtgaaatgggggtggggagtgggaggaaaggtgacttcctctggtgtttattataaagcttaaattttatatcattttaaaatgtcttggtcttctactgccttgaaaaatgacaattgtgaacatgatagttaaactaccactttttttaaccattattatgcaaaatttagaagaaaagttattggcatggttgttgcatatagttaaactgagagtaattcatctgtgaatctgctttaattacctggtgagtaacttagaaaagtggtgtaaacttgtacatggaattttttgaatatgccttaatttagaaactgaaaaatatcyggttatatcattctgggtgtgttcttactgacaccaggggtccgctgccccatgtgtcctggtgagaaaatatatgcctggcacagcttttgtatagaaaattcttgagaagtaactgtccgctagaagtctgtccaaatttaaaatgtgtgccatattctggttcttgaaaataagattccagagctctttgatcgcttttaataaactgcaagttcattttaaatgaagggccagcatatatacttgcaagataattttcagctgcaaggattcagcaccagttatgtttgaatgaaccctccttttctctgagattctggtccctggaaatccctttctgctagtggtgagcatgtaagtgttaagtttttaatctgggagcagggcataggaagaaaatgtcagtagtgctaatgcattttgcactagaacgcttcgggaaaatattcatgcttgccatctgttcatttctaaatttatattcataaagttacagtttgatacaggaattattaggagtaattcttttctgtttctgtttataatgaagaacactgtagctacattttcagaagttaacatcaagccatcaaacctgggtatagtgcagaaaacgtggcacacactgaccacacattaggctgtgtcaccattgtgtggtgtacctgctggaagaattctagcatgctacttggggacataatttcagtgggaaatatgccactgaccgattttttttttttcctctttgcagtggggctaggacagttgattcaacaaagtatttttttcttttttctcagtcctaatttgaacaggtcaaagatgtgttcaggcattccaggtaacaggtgtgtatgtaaagttaaaaataggctttttaggaactcactctttagatatttacatccagcttctcatgttaaatatttgtccttaaagggtttgagatgtacatctttcatttcgtatttctcataggctatgccatgtgcggaattcaagttaccaatgtaacactggccagcgggcccagcaatctccatgtgtacttattacagtcttatttaaccaggggtcctaaccactaacattgtgactttgctttgagacctttcctctcctgggtactgaggtgctatgaagccaactgacaaagatgcatcacgtgtcttaggctgatgccactacccgatttgtttatttgcaatttgagccatttaaagaccaataaacttccttttttaaaaaaaaaaaaaaaaaaaaaaaaa

SEQ ID NO: 548 - DNA, 630 bp, Homo sapiens
  misc feature (61): n equals a,t,g, or c
gcggttgtacatttggtctagcgatgaaaactgagggaaaggatgtagggcctcctggctnaaccagccagggggaaaggggaggtttccggtgtcagctgtctctggttgtctccataaccagttcttacttgcctgtgcagactttgaggggaaggttgtgaagacttcggttgtgttccaccaactggggacagccatgcctatgtcggtggaggaagggcctgagtgccagggacctgtggttgacagcgctgccctcgatgtggtcatgaaggaatggcataccacaccagacagatgcgttcagccgatgaagggcaaactgtcttctacacctgtaccaactgcaagttccaggagaaggaagactcttgacctttttcctgggcaactctrcagtccctccctcctttcggaaggtgaaggatactgggtttttagatgccttgtccatcctgtctggttgcaatgttttgctcccagaagagaatcagatcatcatgtggggattaccattgttcctggagtactcctacccttagttgaatttccttattaaagttatatttttctataagaaaaaaaaaaaaaaaaaaaaaaaaaaaaaaaaaaaaaaaaaaaaaaaaa

SEQ ID NO: 549 - DNA, 586 bp, Homo sapiens
  misc feature (508): n equals a,t,g, or c
  misc feature (510): n equals a,t,g, or c
  misc feature (514): n equals a,t,g, or c
  misc feature (573): n equals a,t,g, or c
  misc feature (583): n equals a,t,g, or c
ggcacgaagccgcgtttgtactgtgtcttaccatgcctgaaccggcaaaatccgctccggcccctaaaaagggctccaagaaagccgtcaccaaagcccagaagaaagacggcaagaagcgcaagcgcagccgcaaagagagctactccatctacgtgtacaaggtgctgaagcaggtccaccccgacaccggcatctcgtccaaggccatgggcatcatgaactccttcgtcaacgacatcttcgagcgcatcgsgggagaggcttcccgcctggcgcactacaacaagcgctccaccatcacatcccgcgagatccagacggccgtgcgcctgctgctgcccggcgagctggccaagcacgccgtgtccgagggcaccaaggcggtcaccaagtacaccagctccaagtgagtccctgccgggacctggcgctcgctcgctcgagtcgccggctgcttgactycaaaggctcttttcagarccacccacctaatcactagaaaarnancttngttcacttaatttcccctttaatttctttttccataaaargttaagttaatttttaagnggtgaaaggntca

SEQ ID NO: 550 - DNA, 1586 bp, Homo sapiens
  misc feature (1574): n equals a,t,g, or c
  misc feature (1578): n equals a,t,g, or c
  misc feature (1585): n equals a,t,g, or c
ccgctcagtccgggagcgcagctgggccgcggcgctccgacctccgctttcccaccgcccgcagctgaagcacatcccgcagcccggcgcggactccgatcgccgcagttgccctctggcgccatgtcgcagaacggagcgcccgggatgcaggaggagagcctgcagggctcctgggtagaactgcacttcagcaataatgggaacgggggcagcgttccagcctcggtttctatttataatggagacatggaaaaaatactgctggacgcacagcatgagtctggacggagtagctccaagagctctcactgtgacagcccacctcgctcgcagacaccacaagataccaacagagcttctgaaacagatacccatagcattggagagaaaaacagctcacagtctgaggaagatgatattgaaagaaggaaagaagttgaaagcatcttgaagaaaaactcagattggatatgggattggtcaagtcggccggaaaatattccccccaaggagttcctctttaaacacccgaagcgcacggccaccctcagcatgaggaacacgagcgtcatgaagaaagggggcatattctctgcagaatttctgaaagttttccttccatctctgctgctctctcatttgctggccatcggattggggatctatattggaaggcgtctgacaacctccaccagcaccttttgatgaagaactggagtctgacttggttcgttagtggattacttctgagcttgcaacatagctcactgaagagctgttagatcctggggtggccacgtcacttgtgtttatttgttctgtaaatgctgcgttcctaatttagtaaaataaaagaatagacactaaaatcatgttgatctataattacacctatgggatcaataagcatgtcagactgattaatgtctactgtgaaaatttggtagtaaattttcatttgatattagatataaatatctgaatataaataattttaatatactagtcatgatgtgtgttgtattttaaaaattatctgcaaccttaattcagctgaagtactttatatttcaaaagaatgaataacattgataataaaatcgctactttaaggggtttgtccaaaataaatattgtggccttatatatcacactattgtagaaagtattatttaatttaaatggatgcaggttgtctactaaagaaagattatatataactatgctaattgttcataatcaacagaaaccaagatagagctacaaactcagctgtacagttcgtacactaaactcttcttgcttttgcattataaggaattaagtctccgattattaggtgatcaccctggatgatcagttttctgctgaaggcacctactcagtatcttttcctctttatcactctgcattggtgaatttaatcctctcctttgtgttcaacttttgtgtgcttttaaaatcagctttattctaagcaaatctgtgtctactttaaaaaactggaaatggaaaaaaaaataaatctttgccaaatcctaaaaaaaaaaaaaaaaaymggggggggcccngganccaattnc

SEQ ID NO: 551 - DNA, 2143 bp, Homo sapiens
  misc feature (1602): n equals a,t,g, or c
  misc feature (2086): n equals a,t,g, or c
  misc feature (2097): n equals a,t,g, or c
  misc feature (2140): n equals a,t,g, or c
cgtccgcggacgcgtgggcggacgcgtgggcgagctgcagatgaagttttagcagaagcaaagaaaccacgaattgaggatgaagagtgtgtgcgccttgataaagagagattggctgcccgtttggagggtcacaaagaagggattgtacagactgaacagattaggtctttgtctgaagctatgtcagtggaaaaaattgctgcaatcaaagccaaaattatggctaagaaaagatctactatcaagactgatctagatgatgacataactgcccttaaacagaggagttttgtggatgctgaggtagatgtgacccgagatattgtcagcagagagagagtatggaggacacgaacaactatcttacaaagcacaggaaagaatttttccaagaacatttttgcaattyttcaatctgtaaaagccagagaagaagggcgtgcacctgaacagcgacctgccccaaatgcagcacctgtggatcccactttgcgcaccaaacagcctatcccagctgcctataacagatacgatcaggaaagattcaaaggaaaagaagaaacggaaggcttcaaaattgacactatggggaacytaccatggtatgacactgraatctgtaacggagggtgcatctgcccggaagactcagactcctgcagcccagccagtaccaagaccagtttctcaagcwagacctcccccaaatcagaagaaaggatctcgaacacccattatcataattcctgcagctaccacctctttaataaccatgcttaatgcaaaagaccttctacaggacctgaaatttgtcccatcagatgaaaagaagaaacaaggttgtcaacgagaaaatgaaactctaatacaaagaagaaaagaccagatgcaaccagggggcactgcaattagtgttacagtaccttatagagtagtagaccagccccttaaacttatgcctcaagactgggaccgcgttgtagccgtttttgtgcagggtcctgcatggcagttcaaaggttggccatggcttttgcctgatggatcaccagttgatatatttgctaaaattaaagccttccatctgaagtatgatgaagttcgtctggatccaaatgttcagaaatgggatgtaacagtattagaactcagctatcacaaacgtcatttggatagaccagtgttcttacggttttgggaaacattggacaggtacatggtaaagcataaatcgcacttgagattctgaattatttggctcctccatttctggaaattgagactcaagctttatgaatttatcaagaacttaaaaatgaagaaggtcacagattgatcttttataagaccttatttgatgctttgtgcttcaaggagatgatacctgtcatccatataagcaaactttttggcttacaactatttttttaatattagccttctagtctgtaatggaaattgtatattttgatagaagttttttctccattggttaaattagcattacttaaaatttgtttctttagaaaataaatgcaggttataaatgtgtgtatatttagagattataaggctctctgagccatcttctgatttttncattgctctataattctttttactgaaaatactatgttatgaatggtattaaattttagtctctggaacatccaaaaccaagcaaagggatgtgactattttgaatgaatcagaatgtcaacttgtatgtacactatatctacacttactcattatttaaaaagaataatgaaaaatctagatcaattcttcaatttgattgaactgttcagccttttcaagatttctttatttacaaatgattacatttaaatgaatgtacattcttctcactgactttggtgattttgaaacctagaatgatgtgtttctatctgtaatatctttccatttgaaaaaaatctcaaaacacagattaaaaccacaataggctgtagtattttttattttgggagccagagtatgatttgggggaagaatatgtatcagccctattgcagtataactttaagctccttttctctttagtccacttttgattggnaattttatggnataggatttgaatctcccatttaaggctggcagcctggagtcntac

SEQ ID NO: 552 - DNA, 1634 bp, Homo sapiens
  misc feature (14): n equals a,t,g, or c
  misc feature (1468): n equals a,t,g, or c
  misc feature (1509): n equals a,t,g, or c
  misc feature (1519): n equals a,t,g, or c
  misc feature (1566): n equals a,t,g, or c
  misc feature (1608): n equals a,t,g, or c
  misc feature (1623): n equals a,t,g, or c
  misc feature (1629): n equals a,t,g, or c
cggggctgaggctngggagctggagcggggaagaaaagggaattccaacctgtggaaccttggggggtccccggggtcggcgccttcccattgactgtgggcggtgcaagggacggagcctctggcggctcgtgggggtgttggggtccgcagggggagggaggggagtgtcagagtgtgagcggggtacgggaattccaaatttgagggcctcccggctctggcgccggggagggagagctcaggccgccatgcgggacaggacccacgagctgagacagggggatgacagctcggacgaagaggacaaggagcgggtcgcgctggtggtgcacccgggcacggcacgkctggggagcccggacgaggagttcttccacaaggtccggacaattcggcagactattgtcaaactggggaataaagtccaggagttggagaaacagcaggtcaccatcctggccacgccccttcccgaggagagcatgaagcaggagctgcagaacctgcgcgatgagatcaaacagctggggagggagatccgcctgcagctgaaggccatagagccccagaaggaggaagctgatgagaactataactccgtcaacacaagaatgagaaaaacccagcatggggtcctgtcccagcaattcgtggagctcatcaacaagtgcaattcaatgcagtccgaataccgggagaagaacgtggagcggattcggaggcagctgaagatcaccaatgctgggatggtgtctgatgaggagttggagcagatgctggacagtgggcaaagcgaggtgtttgtgtccaatatcctgaaggacacgcaggtgactcgacaggccttaaatgagatctcggcccggcacagtgagatccagcagcttgaacgcagtattcgtgagctgcacgacatattcacttttctggctaccgaagtggagatgcagggggagatgatcaatcggattgagaagaacatcctgagctcagcggactacgtggaacgtgggcaggagcacgtcaagacggccctggagaaccagaagaaggcgaggaagaagaaagtcttgattgccatctgtgtgtccatcaccgtcgtcctcctagcagtcatcattggcgtcacagtggttggataatgtcgcacattgttggcactaggagcaccaggaacccagggcctggccttctctcccagcagcctggggggcagggcagagcctccagtcggaccccttcctcacactggcccctatgcagaagggcagacagttcttctggggttggcagctgctcattcatgatggcctcctccttcaggcctcaatgcctgggggaggcctgcactgtcctgattggccgggacacacggttttgtaaaaaattaaaaaacaaaaaaagagcatagaaagccctgtgcacgtgtgttcctggaagggctggcccaaggctttcgggcatncaacctccttaccttctggacgtcccagggccaggtctggnccttggctgnttcaggtcaaactggcaggggtgcttgtgcccacaagcaaggctggntctggccttttttggaacccccattaagggaatgggttgggncaagggaagggggtnaacaanccggg

SEQ ID NO: 553 - DNA, 278 bp, Homo sapiens
ggcacagaaggaactcaccaaggcccatragctggaggtraggctgcacactttcagcatgtttggratgccccggctgccccctraggaccggcggcactgggagataggagagggtggcgacagtggcctgaccatcgagaagtcctggagggagctggtgcctgggcacaaggagatgagccaggagctytgccaccaacaggaggccctgtggragctcctgaccaccgagctgatcttacgtgagaaagcttcaagatcatgaactgatcttg

SEQ ID NO: 554 - DNA, 2658 bp, Homo sapiens
  misc feature (1): n equals a,t,g, or c
  misc feature (1292): n equals a,t,g, or c
  misc feature (2128): n equals a,t,g, or c
nggcacgaggagagtcacctggactcagaactagagatatccaatgacccagacaaaattaaacttcagctttctaagcataaggagtttcagaagactcttggtggcaagcagcctgtgtatgataccacaattagaactggcagagcactgaaagaaaagactttgcttcccgaagatastcagaaacttgacaatttcctaggagaagtcagagacaaatgggatactgtttgtggcaagtctgtggagcggcagcacaagttggaggaagccctgctcttttcgggtcagttcatggatgctttgcaggcattggttgactggttatacaaggtggagccacagctggctgaggaccagcccgtgcacgggggaccttgacctcgtcatgaacctcatggatgcacacaaggttttccagaaggaactggggaaagcgaacaggaaccgttcaggtcctgaagcggtcaggccgagagctgattgagaatagtcgagatgacaccacttgggtaaaaggacagctccaggaactgagcactcgctgggacactgtctgtaaactctctgtttccaaacaaagccggcttgagcaggccttaaaacaagcggaagtgtttcgagacacagtccacatgctgttggagtggctttctgaagcagagcaaacgcttcgctttcggggagcacttcctgatgacacagaggccctgcagtctctcattgacacccataaggaattcatgaagaaagtagaagaaaagcgagtggacgttaactcagcagtagccatgggagaagtcatcctggctgtctgccaccccgattgcatcacaaccatcaaacactggatcaccatcatccgagctcgcttcgaggaggtcctgacatgggctaagcagcaccagcagcgtcttgaaacggccttgtcagaactggtggctaatgctgagctcctggaagaacttctggcatggatccagtgggctgagaccaccctcattcagcgggatcaggagccaatcccgcagaacattgaccgagttaaagcccttatcgctgagcatcagacatttatggaggagatgactcgcaaacagcctgacgtggaccgggtcaccaagacatacaaaaggaaaaacatagagcctactcacgcgcctttcatagagaaatcccgcagcggaggcaggaaatccctaagtcagccaacccctcctcccatgccaatcctttcacagtctgaagcaaaaaacccacggatcaaccagctttctgcccgctggcancaggtgtggctgttagcactggagcggcaaaggaaactgaatgatgccttggatcggctggaggagttgaaagaatttgccaactttgactttgatgtctggaggaaaaagtatatgcgttggatgaatcacaaaaagtctcgagtgatggatttcttccggcgcattgataaggaccaggatgggaagataacacgtcaggagtttatcgatggcattttagcatccaagttccccaccaccaagttagagatgactgctgtggctgacattttcgaccgagatggggatggttacattgattattatgaatttgtggctgctcttcatcccaacaaggatgcgtatcgaccaacaaccgatgcagataaaatcgaagatgaggttacaagacaagtggctcagtgcaaatgtgcaaaaaggtttcaggtggagcagatcggagagaataaataccgggtaaggaagagaaaaagcagtcctttgttgtggtggtttctcatatgtggctgatcccaccttttcctcctgatgcttagaggcccagagcccatcggacttgagatgtggtcactctctgacctcatctctatagatgccaagtgtcaggtaccctgttacatctgaaaactagtcccatatctacctagatagtagtagtttgtatttaagttttaagataggagatatttcagagctgtcacttcacatctgacaaagttcctagggggatgaaggtacctttggaaacaattatatctattgactgaccacttgcccacaaagagatggtcattgtgagcctgagtggctcccaggctagagaggcctggggnaaactktgttgaagccccaacagacactgtgcctgctctgagctgggctacaaatggggcccaggagcactgaggagacatcaggctcagtggtcttccctggaaagccatgctaggtgtggccataactgacagtgaactatacttgtgttttagcttcttttgggaccagggtcagggacatagaaggatctgaaacaggtctcctaaaatatatcaacagctcgtcaagattctctaaagtcctaagaaaaatctatgattggcaaagaggatttagattgcactaagaaacacaggaaggtccatgtttcattagtatatccaaaatgtcctcaaagtacaccaaatctaccccatgctgcagtctcctgaggagtgctgggtgaatctgctttgaatataacctagggcatttagttaataaagctccatataatcttatgcctgcttgttggattttgttttcttgttttttgtttttaattatctatgagagaaatgaattaacaagaacaacatagcatgga

SEQ ID NO: 555 - DNA, 1728 bp, Homo sapiens
  misc feature (1517): n equals a,t,g, or c
  misc feature (1525): n equals a,t,g, or c
  misc feature (1641): n equals a,t,g, or c
  misc feature (1642): n equals a,t,g, or c
gaacgaactacatctcccggcaggctgcggaagggggtcgagtagaaggaccgccgctccggcctcccgcgacttctcgaaggtgggcaggtcccaccttgtggaggatggaggtgaccggggacgccggggtaccagaatctggcgagatccggactctaaagccgtgtctgctgcgccgcaactacagccgcgaacagcacggcgtggccgcctcctgcctcgaagacctgaggagcaaggcctgtgacattctggccattgataagtccctgacaccagtcaccctggtcctggcagaggatggcaccatagtggatgatgacgattactttctgtgtctaccttccaatactaagtttgtggcattggctagtaatgagaaatgggcatacaacaattcagatggaggtacagcttggatttcccaagagtcctttgatgtagatgaaacagacagcggggcagggttgaagtggaagaatgtggccaggcagctgaaagaagatctgtccagcatcatcctcctatcagaggaggacctccagatgcttgttgacgctccctgctcagacctggctcaggaactacgtcagagttgtgccaccgtccagcggctgcagcacacactccaacaggtgcttgaccaaagagaggaagtgcgtcagtccaagcagctcctgcagctgtacctccaggctttggagaaagagggcagcctcttgtcaaagcaggaagagtccaaagctgcctttggtgaggaggtggatgcagtagacacgggtatcagcagagagacctcctcggacgttgcgctggcgagccacatccttactgcactgagggagaagcaggctccagagctgagcttatctagtcaggatttggagttggttaccaaggaagaccccaaagcactggctgttgccttgaactgggacataaagaagacggagactgttcaggaggcctgtgagcgggagctcgccctgcgcctgcagcagacgcagagcttgcattctctccggagcatctcagcaagcaaggcctcaccacctggtgacctgcagaatcctaagcgagccagacaggatcccacatagcagcagcgggaagtgtgccaaggaagctctgtggcgttgtgttattggtagacaccctcagcctcatcatttgactacctatgtactactctaccccctgccttagagcaccttccagagaagctattccaggtctcaacatacgccgttccaccaattttttttttagccccaccagcttcaggacttctgccaattttgaatgatatagctgcaccaacaatatcccgcctcctctaattacatatgatgttctctgttcaaaagtaattggcagtgattggccaggcgcagtggctcacgcctgtaatcccagagtgctgggagtataggtggtgagccaccacgcctggcctaaatgaagtaccacatgaccgactgaccgacctggggaacatagcaagaccccatctntacaaaantgtaaaaaataaaaattagccgggtgtggtggtacatgcctgtaatcctagatactcgggaggctaaggcagaagaattcacttgagcccaggagttcgaggctgcaatgaggtgnngatcgtgccattgcattccatcctgggtgggcagagtgaggcctgtctcaaattaattattccagtcccccccaaggaagggattg

SEQ ID NO: 556 - DNA, 3355 bp, Homo sapiens
  misc feature (210): n equals a,t,g, or c
catcagtgttccctggggttttctatgggttatggagtgtagtgacaaaaagggctctgagtgagagatgaactggttatatttgtggcttcttagagctttttaacatgctaatattcattgtattttctaagaagttgtagtgttttctccaaacttccttgatctggaacttttcttgcagggcgtcttgtggaagaagttttttcnagaacacagtctgtagagtgctgtagcaacttctgtcttcaacattcctgtctagctcatttcattctgttgcatctattagtctttaaagtcatgtagtgttttatagtcagtagaatgtagtgactttctattagtttccatttgaattggtaacaaatcctgacttttctccaactccagtaaccttcgagaaagctttgaatgccggcttcatccaggccactgattatgtggagatttggcaggcataccttgattacctgaggagaagggttgatttcaaacaagactccagtaaagagctggaggagttgagggccgcctttactcgtgccttggagtatctgaagcaggaggtggaagagcgtttcaatgagagtggtgatccaagctgcgtgattatgcagaactgggctaggattgaggctcgactgtgcaataacatgcagaaagctcgggaactctgggatagcatcatgaccagaggaaatgccaagtacgccaacatgtggctagagtattacaacctggaaagagctcatggtgacacccagcactgccggaaggctctgcaccgggccgtccagtgcaccagtgactacccagagcacgtctgcgaagtgttactcaccatggagaggacagaaggttctttagaagattgggatatagctgttcagaaaactgaaacccgattagctcgtgtcaatgagcagagaatgaaggctgcagagaaggaagcagcccttgtgcagcaagaagaagaaaaggctgaacaacggaaaagagctcgggctgagaagaaagcgttaaaaaagaagaaaaagatcagaggcccagagaagcgcggagcagatgaggacgatgagaaagagtggggcgatgatgaagaagagcagccttccaaacgcagaagggtcgagaacagcatccctgcagctggagaaacacaaaatgtagaagtagcagcagggcccgctgggaaatgtgctgccgtagatgtggagcccccttcgaagcagaaggagaaggcagcctccctgaagagggacatgcccaaggtgctgcacgacagcagcaaggacagcatcaccgtctttgtcagcaacctgccctacagcatgcaggagccggacacgaagctcaggccactcttcgaggcctgtggggaggtggtccagatccgacccatcttcagcaaccgtggggatttccgaggttactgctacgtggagtttaaagaagagaaatcagcccttcaggcactggagatggaccggaaaagtgtagaagggaggccaatgtttgtttccccctgtgtggataagagcaaaaaccccgattttaaggtgttcaggtacagcacttccctagagaaacacaagctgttcatctcaggcctgcctttctcctgtactaaagaggaactagaagaaatctgtaaggctcatggcaccgtgaaggacctcaggctggtcaccaaccgggctggcaaaccaaagggcctggcctacgtggagtatgaaaatgaatcccaggcgtcgcaggctgtgatgaagatggacggcatgactatcaaagagaacatcatcaaagtggcaatcagcaaccctcctcagaggaaagttccagagaagccagagaccaggaaggcaccaggtggccccatgcttttgccgcagacatacggagcgagggggaagggaaggacgcagctgtctctactgcctcgtgccctgcagcgcccaagtgctgcagctcctcaggctgagaacggccctgccgcggctcctgcagttgccgccccagcagccaccgaggcacccaagatgtccaatgccgattttgccaagctgtttctgagaaagtgaacgggacgctgggagacaggaaatgccttacttcactctggcccggcggacctcccaccacccagcagtgcactggggatggacaggcctggtgtgctgcgtgctcgcaaccacagatggctcctcggctttagacagaaaggggaaggggttctaagtcaagagcctttcagtgctccctcatattgagggcagtggcagaaaagtgaccactctgcaggctgggcccaggatgtggtgtcctgagatagttttgtatcttaaagactgaggcacagaagcgaaacgagaacacactgtttttgagacacagttgtccaaatgtttctggccagctccggcccctttttgtatgacacttctcttccaccctgcacagcacatgtgcccgtgcattcttttaattttaaaagatgaaatggcagatgctagtaattcacagaatggcctcttgtgggggtgggtctgagggaagtcagctataaaacatttgctggagttttgttcaatggggctgtgcatttttatattatgtgtttgtaaatgacatgtcagcccttgtttcatgtttcctaaaagcagaatatttgcaacatttgttttgtataggaattatttgtgccacctgctgtggactgttttctttgcctagtgactagtgacctgtgttgtctaaacatgagtttcagccctttggttttgtttaataccatgtcaaatgcaaacttcaattctccccatttagctttattaaactgacgttctcttcaaaacttcttgctgaatggtactcagatgtgcattcacatacagatgtgttttgaagtgggtgtaccttgctttacctaatagatgtgtaaatagaacttttgtaagtcaaatcccattgtcactttgatttaaattattccagctgtgatgtgtcttcattttatagcagtttgacactggagcttttgagcttttttacctcacatcttttatcaaataatatttactgctttgaaaacagcaacagcattggccagttcagtaggggaagcttgctttattaagacactctggagaaagacgtcagggaatccttgtatatgtcgtgggaatcaactcctcatttatctgttgcgtaagtttaagtttttgtgcatcagtcgggttttctatatttttttaacttaacattttttaatataaccgattaaaaagtagacagaacagtaaaataaactcctgtgtgcctaccaaaaaaaaaaaaaaaaaaaaaaaaaaaa

SEQ ID NO: 557 - DNA, 1079 bp, Homo sapiens
  misc feature (187): n equals a,t,g, or c
  misc feature (641): n equals a,t,g, or c
  misc feature (1042): n equals a,t,g, or c
  misc feature (1055): n equals a,t,g, or c
  misc feature (1064): n equals a,t,g, or c
gccgtggtcggcggctgctgggctccgcgccggggtccgagtcccacgaagccccggcccgagccgccggatgcccgcgcgcagcggsgcccagttttgccgacggatggggcaaaagaagcagcgaccagctagagcagggcagccacacagctcgtccgacgcagcccaggcacctgcagagcanccacacagctcgtccgatgcagcccaggcaccttgccccagggagcgctgcttgggaccgcccaccactccgggcccataccgcagcatctatttctcaagcccaaagggccaccttacccgactggggttggagttcttcgaccagccggcagtccccctggcccgggcatttctgggacaggtcctagtccggcgacttcctaatggcacagaactccgaggccgcatcgtggagaccgaggcatacctggggccagaggatgaagccgcccactcaaggggtggccggcagaccccccgcaaccgaggcatgttcatgaagccggggaccctgtacgtgtacatcatttacggcatgtacttctgcatgaacatctccagccagggggacggggcttgcgtcttgctgcgagcactggagcccctggaaggtctggagaccatgcgtcagnttcgcagcaccctccggaaaggcaccgccagccgtgtcctcaaggaccgcgagctctgcagtggcccctccaagctgtgccaggccctggccatcaacaagagctttgaccagagggacctggcacaggatgaagctgtatggctggagcgtggtcccctggagcccagtgagccggctgtagtggcagcagcccgggtgggcgtcggccatgcaggggagtgggcccggaaacccctccgcttctatgtccggggcagcccctgggtcagtgtggtcgacagagtggctgagcaggacacacaggcctgagcaaagggcctgcccagacaagattttttaattgtttaaaaaccgaataaatgttttatttctagaaaaaaaaaaaaaaaaaaaactcgngggggggcccggnacccaattngccctaaagtgatgg

SEQ ID NO: 558 - DNA, 724 bp, Homo sapiens
ctctaggcctgygtgtycaagacagcctggtcaacatagtgagacactgtctctaccaaaaaaaggaaggaagggacacatatcaaactgaaacaaaattagaaatgtaattatgttctaagtgcctccaagttcaaaacttattggaatgttgagagtgtggttacgaaatacgttaggaggacaaaaggaatgtgtaagtctttaatgccgatatcttcagaaaacctaagcaaacttacaggtcctgctgaaactgcccactctgcaagaagaaatcatgatatagctttgccatgtggcagatctacatgtctagagaacactgtgctctattaccattatggataaagatgagatggtttctagagatggtttctactggctgccagaatctagagcaaagccatccccgctcctggttggtcacagaatgactgacaaagacatcgattgatatgcttctttgtgttatttccctcccaagtaaatgtttgtccttgggtccattttctatgcttgtaactgtcttctagcagtgagccaaatgtaaaatagtgaataaagtcattattaggaagttcaaaagcattgcttttataatgaacttagaaaaacgtatgtgtgtgtgtttaattagaataaaattcctctaggcagattcaggaaaaaaaaaaaaaaaaagtcgagcgcccgcaatttagtagtagtaggtcgcggccgc

SEQ ID NO: 559 - DNA, 3125 bp, Homo sapiens
ggaggagcttctaaagaggtgactggtattttgtagcattccttgtcaagttctcctttgcagaatacctgtctccacattcctagagaggagccaagttctagtagtttcagttctaggctttccttcaagaacagtcagatcacaaagtgtctttggaaattaagggatattaaattytaagtgatttttggatggttattgatatctttgtagtagctttttttaaaagactaccaaaatgtatggttgtccttttttttgttttttttttttttaattattkctcttakcagatcagcaatccctctagggacctaaatactaggtcagctttggcgacactgtgtcttctcacataaccacctgtagcaagatggatcataaatgagaagtgtttgcctattgatttaaagcttattggaatcatgtctcttgtctcttcgtcttttctttgcttttcttctaacttttccctctagcctctcctcgccacaatttgctgcttactgctggtgttaatatttgtgtgggatgaattcttatcaggacaaccacttctcgaactgtaataatgaagataataatatctttattctttatcccccttcaaagaaattacctttgtgtcaaatgccgctttgttgagcccttaaaataccacctcctcatgtgtaaattgacacaatcactaatctggtaatttaaacaattgagatagcaaaagtgtttaacagactaggataatttttttttcatatttgccaaaatttttgtaaaccctgtcttgtcaaataagtgtataatattgtattattaatttatttttactttctataccatttcaaaacacattacactaagggggaaccaagactagtttcttcagggcagtggacgtagtagtttgtaaaaacgttttctatgacgcataagctagcatgcctatgatttatttccttcatgaatttgtcactggatcagcagctgtggaaataaagcttgtgagccctctgctggccacagtgaggaaagtagcacaaataggatacagttgtatgtagtcattggcaacaattgcatacaattttactaccaagagaaggtatagtatggaaagtccaaatgacttccttgattggatgttaacagctgactggtgtgagacttgaggtttcatctagtccttcaaaactatatggttgcctagattctctctggaaactgactttgtcaaataaatagcagattgtagtgtctggtttggtttggacagtagtgctttctatcatattgttgtgtgcaatggtaatttgttctactggccaaagcctctttcagcagtgccttgccatcatgcttaaaagtttggctagtatatcttgctggatggagccttgaactccggcaaggattgaaccatctgacttccaaatttgccttcccctctggacctcactattaacaagcaaacctttcagggccctcttagctctcagaagctatgtatgggctttcccagattttaaagctgctgcctcgagaactactcatttctctcctggtcagcagacagaaatagccatactaatctcatagggctcaaatgcatcttcaggcagcagggaaccaagcagcgtggcacaggccttcttgactggaggaagagcttgctggcatggtgggcagtattccaggagaggccatgtccgtgttcacttcttggcacatttcagttccgttttcctcttgtttaaaactgcctctttagatgtggatgccttaatgctgtaacacatttgaaaacattggcaatacttaagttgctgccatgattacagatggaattattggctaccaaagagacgcaattgatgatgagaagcatgattcttgcttccatataaccaaagttaatcttaattgcaatttgactccgtttccttggtagggatagactttcttcagattccaagtgctctcttaaatggcaaattaagttaaagaatactactgctccattcccctcacttattctccagttaattgcttgtcagttccatttcaagaaagcagtgatgttccaggtttgattcagttttcctgtgcacactattgccaaatttttttttagcaaagattctgcactggaacgtagacagttggaaacagtactacctacctagaggttatgtgttttctctttctccccgctttcacctctttctttcccaattcaaaacagccaagtgagccctgttctggtattttgaatcattagagaaaagaaagggagtggctgttttgagttgtcctttctttgcagaaaggagaaaatgtgattgtgttttttttttaccagcctacttctaagtgtcactgcctggtttttctctttttcaaggattagaactaagaggacacaccagcatcggagtgtattaagcccctgaaacacatggtagctagggactgaacacaggaaccgtatgacagcagcacaaacccccaaaggatgttcctgccttgtgggcccctgagccccttgggagactgagaatcatgaccagattcatccagaactgctgcagtgttaagtgaaaatcctctgtagttgttctgcagaggaaccttccttccattagaaaatttctgctcaatacagaatggtccacatcacccaaagtgcactgttggagatgctgtgaaattaaaacctctttgtacctgagacatctagattcacctcaggaggcctgaaggaaatgtgtaacttgtgggaaagaactagacaaccatttaggaattctctagatatactcagcctaacccagtggcttaacacaaggagattggctttgatctttttttcttgtggcatcttccagcaagttagaagtctcatgggataagactgcagttcccctggttcaatagctggaacagtgattttaaatgtccctttttctggatcccttgtaaacatgaaatcattccatggatggctgccttataattttgtctctttccactttaattgtgaatggttaaaaaaatgctgttttctgatattaaatttttattagtgcataccttaaaaaaaaaaaaaaaaaaaaaaactcgag

SEQ ID NO: 560 - DNA, 2645 bp, Homo sapiens
aagaggagctgggcaggaggcagggcaaggagaaagctgttcgggggtcttgtctggattttggttgcctcctccaatgttcctctacctctactacaaggatgggtcatgtttgtgtccgtgacagcgtttttcttttcgctcctctttctgggcatgttcctctctggcatggtggctcaaattgatgctaactggaacttcctggattttgcctaccattttacagtatttgtcttctattttggagcctttttattggaagcagcagccacatccctgcatgatttgcattgcaatacaaccataaccgggcagccactcctgagtgataaccagtataacataaacgtagcagcctcaatttttgcctttatgacgacagcttgttatggttgcagtttgggtctggctttacgaagatggcgaccgtaacactccttagaaactggcagtcgtatgttagtttcacttgtctactttatatgtctgatcaatttggataccattttgtccagatgcaaaaacattccaaaagtaatgtgtttagtagagagagactctaagctcaagttctggtttatttcatggatggaatgttaattttattatgatattaaagaaatggccttttattttacatctctcccctttttccctttccccctttattttcctccttttctttctgaaagtttccttttatgtccataaaatacaaatatattgttcataaaaaattagtatcccttttgtttggttgctgagtcacctgaaccttaattttaattggtaattacagcccctaaaaaaaacacatttcaaataggcttcccactaaactctatattttagtgtaaaccaggaattggcacactttttttagaatgggccagatggtaaatatttatgcttcacggtccatacagtctctgtcacaactattcagttctgctagtatagcgtgaaagcagctatacacaatacagaaatgaatgagtgtggttatgttctaataaaacttatttataaaaacaaggggaggctgggtttagcctgtgggccatagtttgtcaaccactggtgtaaaaccttagttatatatgatctgcattttcttgaactgatcattgaaaacttataaacctaacagaaaagccacataatatttagtgtcattatgcaataatcacattgcctttgtgttaatagtcaaatacttacctttggagaatacttacctttggaggaatgtataaaatttctcaggcagagtcctggatataggaaaaagtaatttatgaagtaaacttcagttgcttaatcaaactaatgatagtctaacaactgagcaagatcctcatctgagagtgcttaaaatgggatccccagagaccattaaccaatactggaactggtatctagctactgatgtcttactttgagtttatttatgcttcagaatacagttgtttgccctgtgcatgaatatacccatatttgtgtgtggatatgtgaagcttttccaaatagagctctcagaagaattaagtttttacttctaattattttgcattactttgagttaaatttgaatagagtattaaatataaagttgtagattcttatgtgtttttgtattagcccagacatctgtaatgtttttgcactggtgacagacaaaatctgttttaaaatcatatccagcacaaaaactatttctggctgaatagcacagaaaagtattttaacctacctgtagagatcctcgtcatggaaaggtgccaaactgttttgaatggaaggacaagtaagagtgaggccacagttcccaccacacgagggcttttgtattgttctactttttcagccctttactttctggctgaagcatccccttggagtgccatgtataagttgggctattagagttcatggaacatagaacaaccatgaatgagtggcatgatccgtgcttaatgatcaagtgttacttatctaataatcctctagaaagaaccctgttagatcttggtttgtgataaaaatataaagacagaagacatgaggaaaaacaaaaggtttgaggaaatcaggcatatgactttatacttaacatcagatcttttctataatatcctactactttggttttcctagctccataccacacacctaaacctgtattatgaattacatattacaaagtcataaatgtgccatatggatatacagtacattctagttggaatcgtttactctgctagaatttaggtgtgagattttttgtttcccaggtatagcaggcttatgtttggtggcattaaattggtttctttaaaatgctttggtggcacttttgtaaacagattgcttctagattgttacaaaccaagcctaagacacatctgtgaatacttagatttgtagcttaatcacattctagacttgtgagttgaatgacaaagcagttgaacaaaaattatggcatttaagaatttaacatgtcttagctgtaaaaatgagaaagtgttggttggttttaaaatctggtaactccatgatgaaaagaaatttattttatacgtgttatgtctctaataaagtattcatttgataaaaaaaaaaaaaaaaaaaaactcgag

SEQ ID NO: 561 - DNA, 1717 bp, Homo sapiens
  misc feature (386): n equals a,t,g, or c
  misc feature (427): n equals a,t,g, or c
gctgaaatgactatacgaggtaaagaagtagtaccagatggtcccaaagttcccttttagcctgaaagcttttctttgtccctccttagtgaatctgtgttccgagccctactctaaagttcagtggtcaatacaatagtccaccaagagactgggaatrattagaagtgaaattggtccctccttaccaaggaggggcagatgatctccattgcacagggcgattagattctggagctgaggtggggactgcaggaggccacctagtctggtaggtttcaacccaagctgtgtacattagaattcccttgggagcgtgcaggaaatacagatgcccatgccacattccagaccaactgaagctgaatctccagagtagggcctgnatggcatataagcttcacaggtgatctgcagtacagtgaanatggaagactgcatgtgtacctatttgcaataaagatgaagaggacagcaagctccagacaggagctgggactyaacccagatctcttaagtcctgcctggtggctccttaaaagtccagaagtgttgccccaagccctccctcaacatctctgggaaccgcagctgcagcacgatgggggttcagtgcccctgtttgccccttacccagctgtggtttattctgcttgtatgtctgcacaggccggatgctcgtgttccttgtcttattctccatttactcagtcactggggctcactcccgtctgatgcactagccaagattgccttagtgtgctccagaaaagaaggccaaatcccaggcattgtcagggcagcagagctctacaggataggcttacctttcccacctgtgtggctagcacttcacagtttacaaattcctcccacctccactcagtgacacatgctgttctaacacaggtcaggcaggcattacagtccccatgttcagaatcaaagacctagcctcagagaagtgaagaaacatcatgccaaggtcattgactgccaagcggtagaggtggggttgcatccagagagcttcccggtatgcctctgcacaatgccattccttggccagctccctccaccccaagggacccagactgcacacttaacaaacaggacacaggtgtctttgaacaaacttttttgtattattatttttacatctagaataaattatttaaattatttcacagcaagggagagggataggtaatttttatcagatatttttttaaaccatctgttttttaaattacatttttgtttatgttcttgagctgatgtagtggaacttgcctagcacattcaggtcccagccagttggcagagcatgctctcatctccttattccataccctgggcgtcccctttctgttgactcaggaactttctgagaatgaggacagcactaggagatgagctttggcaggtatccaccttaacgctacaataattgtgcttcctgaaacaaaacttgagattgtatcatagaaggaaacaggaagtcagaaatcaaatctatgcttttaattgaaaccgtgcctgaaacagtttgaatgattgttttaatgttgtttctgaaattccttgtacctttgtgaaaaataatgataataaataaaagtgaaaataaatagatgtggaatatgcaatggaaataatgtaacaaaataataaacatctggccattttactacaaaaaaaaaaaaaaaaaaaaaaa

SEQ ID NO: 562 - DNA, 2417 bp, Homo sapiens
  misc feature (2362): n equals a,t,g, or c
  misc feature (2386): n equals a,t,g, or c
  misc feature (2398): n equals a,t,g, or c
caaagccgggaagaggaaaagctcggacctaccctgtggtcccgggtttctgcagagtctacttcagaagcggaggcactgggagtccggtttgggattgccaggctgtggttgtgagtctgagcttgtgagcggctgtggcgccccaactcttcgccagcatatcatcccggcaggcgataaactacattcagttgagtctgcaagactgggaggaactggggtgataagaaatctattcactgtcaaggtttattgaagtcaaaatgtccaaaaaaatcagtggcggttctgtggtagagatgcaaggagatgaaatgacacgaatcatttgggaattgattaaagagaaactcatttttccctacgtggaattggatctacatagctatgatttaggcatagagaatcgtgatgccaccaacgaccaagtcaccaaggatgctgcagaagctataaagaagcataatgttggcgtcaaatgtgccactatcactcctgatgagaagagggttgaggagttcaagttgaaacaaatgtggaaatcaccaaatggcaccatacgaaatattctgggtggcacggtcttcagagaagccattatctgcaaaaatatcccccggcttgtgagtggatgggtaaaacctatcatcataggtcgtcatgcttatggggatcaatacagagcaactgattttgttgttcctgggcctggaaaagtagagataacctacacaccaagtgacggaacccaaaaggtgacatacctggtacataactttgaagaaggtggtggtgttgccatggggatgtataatcaagataagtcaattgaagattttgcacacagttccttccaaatggctctgtctaagggttggcctttgtatctgagcaccaaaaacactattctgaagaaatatgatgggcgttttaaagacatctttcaggagatatatgacaagcagtacaagtcccagtttgaagctcaaaagatctggtatgagcataggctcatcgacgacatggtggcccaagctatgaaatcagagggaggcttcatctgggcctgtaaaaactatgatggtgacgtgcagtcggactctgtggcccaagggtatggctctctcggcatgatgaccagcgtgctggtttgtccagatggcaagacagtagaagcagaggctgcccacgggactgtaacccgtcactaccgcatgtaccagaaaggacaggagacgtccaccaatcccattgcttccatttttgcctggaccagagggttagcccacagagcaaagcttgataacaataaagagcttgccttctttgcaaatgctttggaagaagtctctattgagacaattgaggctggcttcatgaccaaggacttggctgcttgcattaaaggtttacccaatgtgcaacgttctgactacttgaatacatttgagttcatggataaacttggagaaaacttgaagatcaaactagctcaggccaaactttaagttcatacctgagctaagaaggataattgtcttttggtaactaggtctacaggtttacatttttctgtgttacactcaaggataaaggcaaaatcaattttgtaatttgtttagaagccagagtttatcttttctataagtttacagcctttttcttatatatacagttattgccacctttgtgaacatggcaagggacttttttacaatttttattttattttctagtaccagcctaggaattcggttagtactcatttgtattcactgtcactttttctcatgttctaattataaatgaccaaaatcaagattgctcaaaagggtaaatgatagccacagtattgctccctaaaatatgcataaagtagaaattcactgccttcccctcctgtccatgaccttgggcacagggaagttctggtgtcatagatatcccgttttgtgaggtagagctgtgcattaaacttgcacatgactggaacgaagtatgagtgcaactcaaatgtgttgaagatactgcagtcatttttgtaaagaccttgctgaatgtttccaatagactaaatactgtttaggccgcaggagagtttggaatccggaataaatactacctggaggtttgtcctctccatttttctctttctcctcctggcctggcctgaatattatactactctaaatagcatatttcatccaagtgcaataatgtaagctgaatcttttttggacttctgctggcctgttttatttcttttatataaatgtgatttctcagaaattgatattaaacactatcttatcttctcctgaactgttgattttaattaaaattaagtgctaattaccanaaaaaaaaaaaaaggsggccggtntaaggatccctngaggggccaagttacgcgg

SEQ ID NO: 563 - DNA, 1544 bp, Homo sapiens
caaggattcagaattttgcagtcacagaagagtgtatttattatgtagaatgaatgagggtactgtcacctgccttaatgtaggtaggcccagagtcttacatttaagatcttacatgcagttataaaaccgccacagtcttcaatccagatttgaagactcatgccataggtgacattctaaaataccattaaagccacttaaatgttaaataagaatatacatgcacatcagctcaatgtctttgagtattaattttatgtaagcattctatttaacatgaatataggacaaatcatggctatatctatagaccttggataaactggattgaccaattatacactcacggtgacttttttattggtgggaaggggattggggtggggcaggctggcttaatgtaatatgagcaaccaaagtgggacttctgtctccccgctatattcccattgctctgaatggttgattgaagggtcagggaactagattttatggctttagttcactgtgattgtacatttatacttggcctatgtgctggccgcacctgaacatagctggtgcttatgccgagttatttgygatgagtaaatatttagtttctttttcttcatatttataatgttgatctggcatcctcaggctgcagctttattagcttataamttactcatctctrtctttaccagcaggctctgtattgttgatatttgcaacttgttttgcttttccattggtggaattgaaataattagtttttaattacataagatgcctgtttgctatttggtggaagatagatgttcatattgaagcagtcacatttgtactgtagttcaataaaagaaaaatgaagtattctgtagcctatatttttcatagagctcatgagcatttactgtacttgctgggtcttgccaagatcatttattccgctgcattgccaaagtgtcttcataccaaattaaaggtggttttaatatatgtttcatggaagttgtttataaaattcaaaggtatttcatttaggtgaaaagtcttatttattaaagtggtttgaataaagtagatcaaaacttccagagatcttaatggctatataggaagaaatatcactcaccataatttaaataaagaataaaaatacwtgtattttrtggtggcaaatgtttggtagaactgtaattagaaaaatacaagtatatttgcgtgatggttacactagaagcccagactttacgactacacaatatattcatgtatctaaactgtacttgtaccccctaaatttatttttaaaaaaggaaaaataaaagtatcatgaaaaaacctatttttttttccactgtccttccactactcccataacaaacttatccatggttggtaaaattttacatatttctatccttgaaatgaaggcttcttttaaattccaaagaagtcatggaggcctgtgcatttgaattgtatatgctagtgaggaaaagatttagacattycaggcaggktggmmargcgcggtggcycacacctgtaac

SEQ ID NO: 564 - DNA, 2299 bp, Homo sapiens
  misc feature (179): n equals a,t,g, or c
  misc feature (180): n equals a,t,g, or c
tcagacagtttgaatacttgaatcatgcaggccaatattataatgtgaaaaggtatctactctatttacactcccaaatagcgccatacatgctaaaccgtagagaatgagctcgcttgtgtctattcatcatgtttagcctttggattcttttttttttttccttctattcctccccnncccccccccccgcccctttttttytytyttgcaaaaccattttttgggctgataacgtatgagcttttccctttgcactgaatgatgttctctccgtctcatcggcagtatggggggcagctgtcccagtgtcaatgtttactcaagggtgttcttaggaggcgtgcgctctctactatgccttgatgttgcctaccttattgtggtatcgtggagtttaaaagatcaagttaggatgctgacttaggattattaatgaaagtgttgcaccagttttttcatgttgtaaaactaaagaatttcgctctgcagtttgaaaaactgtggccacagctgtgacttgcagcccacctgccacccaggacgggccctgcactttgaataggctttccattttgttttggaggttctcactttgaaccttcttgtttacagatttttttgtttgttttttgagaaaaaaaaatgtttactcttccatcatttaaaaaaaatgtaaaagacaaaaaaaaaatggaggatgatttaaaagatgctttctatctctgggaaaaaggagcagcatttggccatgttcttttgtttttctattcctgtcccaaatcaaagagcatggttctcaggaaaaccagttccccagtttaaaaaaaaaaaaaaaaattccttgtagtttcttagaggaaaaaaagaaaaaccccaacttttagcactgatactacatattgctctgttaaagaattttctctgccaaaaaaaaagaaaaaacaaaaaaacgcttaaagctggagtttgacattctgctttcagatgctgtctttttattagtgagtgatgatggtttgctaataatcaataggtaataattttttgtaatcccatcaagtggctccatatgtttctgctctctcgtgactgtgttaatgtttaactgttgtaccttaaagccgaaatcagtaactatgcatactgtaaccaaggtattgggcttacagagttgtttgttgtataaagaaaattttaaatgttgttgcaaactaacgagttacaccattttaaactttctttcctcccccctttttttgcccacaaatggtattataatgcttgcttagtcaaagaagagagactaaacaagggtaaaaattttaacagtacagaatttgccatcatatcattgccttgattctaactgtttgtgtcctaagatgcaaaagaagtcagtggcttttaactgtttacaaatagaatgtgattgtaaaatgtacagtttggttgtgtttgaattatgaaatttcttcagatataataaaccatgactttttggctgctcaacattaattgtctcctttttgtgaatttatttgtaggctcttttttataatgaaagtttcaaagttgctatgtatgagggttctcatagagcaaccgattaaaaatctaagcaaatatttgaacattttatctgaactcatcacaatttcaccctgaaataatgtgagaacaatgggaaactgtagcttgctccttcccaccctctctgagcatctttgggatcttgttgctcaaaactcttctgtgacttcatcttccccaccatttgtgcccatctcaagcctcagcaagaaaccatgtggaacatgaagcttaatgacttgacagtgtactagtgttaaactctcatacctctgttacaaagcgagaaacgccacacccggactggccttttcttcccccttcacggccctcgcttctccctgcaggagctcgggggcgaaacctgtgtatggatttcagtgtatgacttcagatcatgctccaacttgccaggtgtgagctaatgttgtcggacaccttactataagcaaatgttattcagtgcgttcaatgtatattgacttccatactggtttttccaaaaaccaaaggtagctttgaaaaaccatgtctggaaatgtttggagcgttaagctgattgaccttctgaccttggggctttgagtagtatataattcataactgcgttaattgtattgttaaagtgtttgggagttttttgcgcttgttatgtggaaataaagtgtttgatttaaaaaaaaaaaaaaaaaaaaaaaaaaaaaaa

SEQ ID NO: 565 - DNA, 364 bp, Homo sapiens
ggcacagtgagacaggagcccaggggagaaagacagaaactaagactcaaggagcaacgcaaagcaaagtcaaggagtcaagaccagagtagctgagcagaggccaagaagggtctgagagggctgtgcagcagcaatggccctaaggatgctctgggctggacaggccaaggggatcctaggaggctgggggatcatctgcttggtgatgtctctactcctccagcacccaggagtctacagcaagtgctacttccaagctcaagccccctgtcactatgaggggaaatattttaccctgggtkartcttggctccgcaaggactgtttccattgcacctgtctgcatcctgttgcgtgggct

SEQ ID NO: 566 - DNA, 2481 bp, Homo sapiens
  misc feature (1213): n equals a,t,g, or c
  misc feature (1214): n equals a,t,g, or c
ggcacgwgtggaccgcgagacgcgcgccctcgccgacagccacttccgaggcctgggggtcgatgtccccggcgtcggccaggctccgggccgggtagccttcgtctcggagccgggcgccttctcctacgccgactttgtgcggggcttcttgctgcccaacctgccctgcgtgttttccagcgccttcacgcagggctggggcagccggcggcgctgggtgacgcccgcggggaggcccgacttcgaccacctgctacggacctacggagacgtggttgtaccagttgcaaactgtggggtccaggaatacaactcgaaccccaaagagcacatgactctcagagactacatcacctactggaaagagtacatacaggcgggctactcctctcccaggggctgtctctacctcaaagactggcacttgtgcagggactttccggtggaggacgttttcaccctgcctgtgtacttctcgtccgactggctgaatgagttctgggatgcactggatgtggatgactaccgctttgtctacgcggggcctgcgggcagctggtccccgttccatgctgacatcttccgctccttcagctggtctgtcaatgtctgtgggaggaagaagtggctcctcttccccccagggcaggaagaggccctgcgggaccgccacggcaacctgccctacgacgtgacctccccagcactctgcgacacacacctgcacccacggaaccagcttgctggcccacccttggagatcacgcaggaagcgggcgagatggtgtttgtgcccagtggctggcaccaccaggtgcacaacctggatgacaccatctccatcaaccacaactgggtcaatggcttcaacctggccaacatgtggcgcttcttgcagcaggagctatgcgccgtgcaggaggaggtcagcgagtggagggactccatgcccgactggcaccaccactgccaggtcatcatgaggtcctgctcrggcatcaactttgaagagttttaccacttcctcaaggtcatcgctgagaagaggctcctggtcctgagggaggcagccgctgaggacggtgctgggttgggtttcgaacaggcagcctttgatgttgggcgcatcacagaggtgctggcctccttggttgcgcaccccgacttccagagagtggacaccagcgcgttctcaccacagcccaaagrnntgctgcagcagctgagagaggctgttgatgctgctgcggccccatagcacctgtcgtgaggatagaaggacgggtggacgagaggcagcctcctgctccggggcccttccagaaataaagaccgccctccctgtgaacctggggcccacccctgtcgaggcttgtggcctggctgttcatggccactgcctgggtgcctgttttcaggtgaggcccaatgaggtcagggacccaagatgggatgtggcccttctgacctgcagcaggcctgctgggagctcggagatggtgccaggacctggctcttttgggggccctgcctccttaggccaggacgcctgagctgacaggagtctgtgtctggtgtgccttctctggtggctcctcttaataggccagccctgtcccctcgtctcaggccattggaccacccctggctctgcctgtgggttcagggaggggttggagcagtgctgggcaagctcaccagggcctccaggcagggctggggttggcctccatcacctccaggtgatgggctgtggaaccagcggcctgcgccttcctctgggtacccagagtggagggctgggttgggctggcctttgccacctccctgcctttgcagggcctgtggacagctggagaggccacagatggggtggaatcccatctgctgctgaatcctcacctgggcctgagggactgtgcctgctgtgcactcacagctgggtcttcccaaggatgctgttctcaggagtggtgggtccccagcccctcttcacactgggtatgatggaggtgtgggcgggctcgtccaggccgatcaaggcacagcagtgagcagcggaggcctgtggtggggaatggactctcgtgggatcctcttgcagaggatgccccaggcctgaaccctctagtggatccacagtttgtggagactggcactctcccagccctgtccttgaccgagagtccagcattttttcagttggcccctggttggctgcctcaccccagcaggggaggaggcatccgaatccacagggacggcacgtgccatggctatgcacattgcctgcccgtggcatcaactggggccgctggcacttgtctaggatggaagcccccaagaagggcaggggtttctgtctgctctgttcagtgaatcatgtgaagtgcttgcaaaggcagctttacacagtaggtgcttcatatgtgtctgtcgaatgaatgcgctccagccaacaaaaaaaaaaaaaaaaaa

SEQ ID NO: 567 - DNA, 1364 bp, Homo sapiens
  misc feature (1362): n equals a,t,g, or c
acccacgcgtccgcagcgggagaacgataatgcaaagtgctatgttcttggctgttcaacacgactgcagacccatggacaagagcgcaggcagtggccacaagagcgaggagaagcgagaaaagatgaaacggacccttttaaaagattggaagacccgtttgagctacttcttacaaaattcctctactcctgggaagcccaaaaccggcaaaaaaagcaaacagcaagctttcatcaagccttctcctgaggaagcacagctgtggtcagaagcatttgacgagctgctagccagcaaatatggtcttgctgcattcagggcttttttaaagtcggaattctgtgaagaaaatattgaattctggctggcctgtgaagacttcaaaaaaaccaaatcaccccaaaagctgtcctcaaaagcaaggaaaatatatactgacttcatagaaaaggaagctccaaaagagataaacatagattttcaaaccaaaactctgattgcccagaatatacaagaagctacaagtggctgctttacaactgcccagaaaagggtatacagcttgatggagaacaactcttatcctcgtttcttggagtcagaattctaccaggacttgtgtaaaaagccacaaatcaccacagagcctcatgctacatgaaatgtaaaagggagcccagaaatggaggacatttcattctttttcctgaggggaaggactgtgacctgccataaagactgaccttgaattcagcctgggtgttcaggaaacatcactcagaactattgattcaaagttgggtagtgaatcaggaagccagtaactgactaggagaagctggtatcagaacagcttccctcactgtgtacagaacgcaagaagggaataggtggtctgaacgtggtgtctcactctgaaaagcaggaatgtaagatgatgaaagagacaatgtaatactgttggtccaaaagcatttaaaatcaatagatctgggattatgtggccttaggtagctggttgtacatctttccctaaatcgatccatgttaccacatagtagttttagtttaggattcagtaacagtgaagtgtttactatgtgcaasggtattgaagttcttatgaccacagatcatcagtactgttgtctcatgtaatgctaaaactgaaatggtccgtgtttgcattgttaaaaatgatgtgtgaaatagaatgagtgctatggtgttgaaaactgcagtgtccgttatgagtgccaaaaatctgtcttgaaggcagctacactttgaagtggtctttgaatacttttaataaatttattttgataaataatattgaamaaaaaaaaaaaaaaaancc

SEQ ID NO: 568 - DNA, 1606 bp, Homo sapiens
aattcggcacgaggcggagtggctgccctgcgcggggacactcagagcccggtgggcgggaggaaggcggcatgccccagacggtgatcctcccgggccctgcgccctggggcttcaggctctcagggggcatagacttcaaccagcctttggtcatcaccaggattacaccaggaagcaaggcggcagctgccaacctgtgtcctggagatgtcatcctggctattgacggctttgggacagagtccatgactcatgctgatgcgcaggacaggattaaagcagcagctcaccagctgtgtctcaaaattgacaggggagaaactcacttatggtctccacaagtatctgaagatgggaaagcccatcctttcaaaatcaacttagaatcagaaccacaggaattcaaacccattggtaccgcgcacaacagaagggcccagccttttgttgcagctgcaaacattgatgacaaaagacaggtagtgagcgcttcctataactcgccaattgggctctattcaactagcaatatacaagatgcgcttcacggacagctgcggggtctcattcctagctcacctcaaaacgagcccacagcctcggtgccccccgagtcggacgtgtaccggatgctccacgacaatcggaatgagcccacacagcctcgccagtcgggctccttcagagtgctccagggaatggtggacgatggctctgatgaccgtccggctggaacgcggagtgtgagagctccggtgacgaaagtccatggcggttcaggcggggcacagaggatgccgctctgtgacaaatgtgggagtggcatagttggtgctgtggtgaaggcgcgggataagtaccggcaccctgagtgcttcgtgtgtgccgactgcaacctcaacctcaagcaaaagggctacttcttcatagaaggggagctgtactgcgaaacccacgcaagagcccgcacaaagcccccagagggctatgacacggtcactctgtatcccaaagcttaagtctctgcaggcgtggcacgcacgcacgcacccacccacgcgcacttacacgagaagacattcatggctttgggcagaaggattgtgcagattgtcaactccaaatctaaagtcaaggctttagacctttatcctattgtttattgaggaaaaggaatgggaggcaaatgcctgctatgtgaaaaaaacatacacttagctatgttttgcaactctttttggggctagcaataatgatatttaaagcaataattttttgtatgtcatactccacaatttacatgtatattacagccatcaaacacataaacatcaagatatttgaaggactctaattgtctttccttgacaagttgattttgcaattgtggtaaatagcaaataacaatcttgtattctaacataatctgcagttgtctgtatgtgttttaactattacagtgcatgttagggagaaattccctgaatttctttagttttgtattcaaacaattatgccactcgatgcaacaaacataataaatacataaaagatttaaaaaawaaaaaaaaaaaaaaaaaaaaaaaaaaaaaaaaaagggggg

SEQ ID NO: 569 - DNA, 1385 bp, Homo sapiens
ctgggaagagtttcgatgtctctagggtggctagagcgtcctcccgcgctcagtcgcgctgcaggtgacggcgcccggaggctgtcgggaagtaggcggggtgacgtgtggttgacgagctcggcggcgggtttgctgagatctgtggccggcggcagctggtgcggggggcagctgagagcgagaggtggatcggggcggtgtgtggccagggccatgacgggcaatgccggggagtggtgcctcatggaaagcgaccccggggtcttcaccgagctcattaaaggattcggttgccgaggagcccaagtagaagaaatatggagtttagagcctgagaattttgaaaaattaaagccagttcatgggttaatttttcttttcaagtggcagccaggagaagaaccagcaggctctgtggttcaggactcccgacttgacacgatattttttgctaagcaggtaattaataatgcttgtgctactcaagccatagtgagtgtgttactgaactgtacccaccaggatgtccatttaggcgagacattatcagagtttaaagaattttcacaaagttttgatgcagctatgaaaggcttggcactgagcaattcagatgtgattcgacaagtacacaacagtttcgccagacagcaaatgtttgaatttgatacgaasacatcagcaaaagaagaagatgcttttcactttgtcagttatgttcctgttaatgggagactgtatgaattagatggattaagagaaggaccgattgatttaggtgcatgcaatcaagatgattggttcagtgcagtaaggcctgtcatagaaaaaaggatacaaaagtacagtgaaggtgaaattcgatttaatttaatggccattgtgtctgacagaaaaatgatatatgagcagaagatagcagagttacaaagacaacttgcagaggaacccatggatacagatcaaggtaatagtatgttaagtgctattcagtcagaagttgccaaaaatcagatgcttattgaagaagaagtacagaaattaaaaagatacaagattgagaatatcagaaggaagcataattatctgcctttcattatggaattgttaaagactttagcagaacaccagcagttaataccactagtagaaaagggaaaataggataaaagaacaaggtgtgagaaggaatagaaggaaacaaacaggaaagatatggctgcaccatgcagtgctactatatgctgagattctacaggatgagatttttgaatagctgagcagttgcctataatctgtgatgacataaaagtatttgacctaaaatctttttatttgcaaaataataaataaaaagtgattctccctcaaaaaaaaaaaaa

SEQ ID NO: 570 - DNA, 1144 bp, Homo sapiens
gcggggtcaggtcccgtcaagcagcctggctcatggctgtgtgcggcctggggagccgtcttggcctggggagccgtcttggcctgcgcgggtgcttcggcgccgccaggtcctgtatccccgtttccagagccgcggccctcagggcgtggaagacggggacaggccacagccttcctcgaagacacccaggatccccaagatttacaccaaaacgggagacaaagggttttctagtaccttcacaggagaaaggagacccaaagatgaccaagtgtttgaagccgtgggaactacagatgaattaagttcagctattgggtttgctctggaattagtcacagaaaagggccatacatttgccgaagagcttcagaaaatccagtgcacattgcaggacgtcggctcggccctggcgacaccatgctcctcggcccgggaggctcacttaaagtataccacgttcaaggcggggcccatcctggagctggagcagtggatcgacaagtacaccagccagctcccaccactcacggccttcatcctgccttcgggaggcaagatcagctcggcgctgcatttctgccgggccgtgtgccgccgggccgagagacgtgtggtgcctcttgtccagatgggagagaccgatgcgaacgtggccaagttcttaaacagactcagtgactatctcttcacgctagccagatatgcagccatgaaggaggggaatcaagagaaaatatacawgaaaaatgacccatcggccgagtctgagggactctgaaatcacagaaagtgggagcttggaggatccctccatggcgatggccgtggagagaggagcttgcccttctggggtcctggttcctgaagagctcacccagagaggctcaaagcagccttttgtcccagctcagctttgatctacacctcttgccaccttcctcaagggactgtgaccctttggggattctgtccctgaccctgcttccccaagctctcctgggtcttggagggatgtgggaatgaattggcattgcaggaaagacaggtaaagtgattgctgcaatgagaaggagctgtgcggaaaaggaataaaagttggaaaggctggaaaaaaaaaaaaaaaaaaaaaaaaaaaaaa

SEQ ID NO: 571 - DNA, 2754 bp, Homo sapiens
  misc feature (2610): n equals a,t,g, or c
  misc feature (2611): n equals a,t,g, or c
ggcctcaagcttcgctgctgggcagttggctggaggggctgctgctgggaacacctggagtctccgcgggcagatctcatattttggattctggatatattataatgagtgacactttgacagcggatgtcattggtcgaagagttgaagttaatggagaacatgcaacagtacgttttgctggtgttgtccctcccgtggcaggaccctggttaggagtagaatgggacaatcccgagagaggaaagcatgatgggagccacgaagggactgtgtattttaaatgcaggcacccgacaggaggatcctttattcgtccgaacaaggtaaattttggaacagactttcttactgcaattaagaaccgctatgtgttagaagatggaccagaggaagatagaaaagagcaaattgttacaattggaaataaacctgtggagactatcggttttgactctattatgaaacagcmaagtcagctgagcaagttgcaagaagtttctctgagggaactgtgcagtaagttgtgctggtgaaaaaggaggagttgctgaagcatgtcctaatatcagaaaggtagatttgtcaaaaaacctgttgtcatcatgggatgaagtgrtacacattgctgatcagctcagacacctggaagtccttaatgtcagtgaaaataaactaaaatttccctccggttcagtattaactggaacgctttctgtactgaaggttttagtcctcaatcaaacaggaataacgtgggctgaggtgctgcggtgtgtcgcggggtgcccaggcctggaggaactctaccttgagtctaacaacattttcatttccgaaagccaacagatgttctccagacagtcaagttattagatctttcctctaatcaattaattgatgaaaatcagctgtatctgatagcccacctgcccaggttagaacaattaatcctctctgacactggaatttcttctctacattttccggatgctggaattgggtgcaaaacgtccatgttcccatccttgaagtacctggtagtaaacgacaatcagatatcacaatggtcgtttttcaatgagctagagaagttaccaagtctacgggctttgtcctgcctaagaaaccccctgaccaaagaggacaaagaagcagagacggcgcgactactcattatcgccagcattggccagctgaagacgctgaacaaatgtgagattctccccgaggagaggcggagagctgagcttgactaccgaaaagcttttggaaatgagtggaaacaggctggtggacataaggwtccggaaaaaaacagactcagcgaagaattcctcacagcccatcccagataccagttcctctgcctgaaatatggtgcacctgaagattgggaactcaaaacacagcaaccacttatgctgaaaaaccagctactaacactgaagataaaataccctcatcaacttgatcagaaagtcctggagaaacaactgccgggctccatgacaattcaaaaggtgaagggattgctgtcacgtcttctcaaagttcctgtgtcagaccttctgttgtcctatgaaagtcccaaaaagccgggcagagaaatcgagctggaaaatgacctaaagtcattacagttttattctgtggaaaatggagattgtctattagtgcgatggtgacaaccaactaataaaatttaaagaccacactgcttatcgtgtctggggttcaccggaaataaatgattcactggaacaattctactgtcaaaacaaagggggtttacaacttgtcctaagtataacaagggatgtatttttwgttgggaagtgaccatttctaggcttatacataatagcaataataaaggctttgaacctactaatgattttctgatcttatttcatatttatttttacagttcatcactgcatttcatgataagatttaaatattaaatagaaagaaactagctagcctaataaaatctgaacacagttagttaatatctgtcataagactagttttaatggaattctctattgaaactactagtttaaagggttacttagaaatgatttggttggtcattttgggaaatgtcccttaaacttggggagacatcctctactatgtataacaatatgctattatctgtcttctcagttgcactatttctaagagtacttaaattaatcacatgcttttccctacaattatacctaagctgagtatatcttcttctgtgataaccagctttgattgaaatgtactcatattaggtaaacattaggcaatgataggaggaaagcaaaactaattctttcaaaatgtcaacaaaatttagaaatatccttcccgatggcactaaaaccctgagaggtatttgcttttattcatactcacacaactttagcatttaaaaactatgagtactaaactgtgaccttcaggatttatgttagatggcagaaagaaaatttgggtattagtctaccatataaatgaacttctttaaaaccaaggttcagaactgagaatcatattggttcctcttcaagttagttcaagttgcccacttcagagatccacaaaatctgnncattatttccagaaaccccaaactttggtataagtgaccactgctcaaatatgtgatcacatgatcacacagcattcctgtgagttcctttttgtctgataattatcctaattagctctacagagctatcctgcaatccaggt

SEQ ID NO: 572 - DNA, 2657 bp, Homo sapiens
  misc feature (1285): n equals a,t,g, or c
gcggcacgagcacgtcttgggcttaggagaagcggccgatggtcccggcctgcagtgacaaacccccctccccgcaccgcccccagcaccccctctcctcttcacctcttcctgctggccacgaggaagccacttcctcagagagaccctaccagatgcggatggaaacagatgcaccaaagcaagccctgatgaaaccgcgacttcctaaggtctgtctcctctgaacttgcacctgggcctctctgtgtttggttccaagcacttcccacctcaaactcccattttcaaaccactgtatctctgcgcacatctgctacttaccagccgcatacatgatggagggttttttggtcctgatccagtggccacacctgtctttgaaatgtctcactgaactccagttttaaaatagattcattgcttmaacacagcaagcccaatgcacccagctaagactggcttgaccgacagcctggcctttggwggggggcttcctggggcctggggaaagctggccaccttcaacagctggtacctcttcaacagtgtggcctttcaaaatgcagatgccaccaggagaacatgcccacagctcaccacctatggatgccatggctctgggcagctttcaaagcaggttcctgtggtctcctcagctgtttgagggggtaacagcaaatcagcctccattttaaaatgaaaacaccagcctccagatgtagggcctgctgggtgttgctagccgctggtccccaggcacggtgcactttctccacctcctgcagcctccctgttgtttctagactcttgcacctggtgagtgcaaggataggtgacccaggggcctgcagccttgtcctcagctcccatctcctggactgccagcctcaccctctgcagttagcatggttggcctgatgcagggatcccgagggattactttttagaccttctttcacattcagaaaagtagtatagattcaggagaggcaagaaaattatgctgtccatagaagtcacccatgaagactgatgccaccacctgaaggctcatgattgttaaaaatgtccacgggaacctctcgtccacaggaggtttgtctcaacacttcccatttttacggcattggcattgcaagcatggggaagtatctgctcttctcatgttaaaagtggcccagcttttcttaactcagtccaagctgacttgtttagctgcactggaatttcttaccaaccaaatatttgcatcgagcaaagggggctgtgtgcacctccctanatggcagcgatgatggctgctgtcattcacgcccatcttcagacgtcacagtctggaagtgaaatgtccacaaacatctgtggcagaaaaggctatacggaccacccagttgtsctgcagctttacagagcaaggaagggttgtggcaaataaatgattaacctgcctcgactgtgctgagggcaacaaaggccatctcaccaaaggattattcratgccattaaatcatcccgtgaccttcctgcttccgagtccatggcctttgcccagggcatgtactcccctgagaggccttctgcctagaaagatctatgactgggttccaaagttgaggcctaggtttttgctgggatttagatattttcaggcaccattttgacagcattcaggaaaacggttattgaccccatagactagggtaagaataaaggcaataaatttggtctgactcagaatataggagatccatatatttctctggaaaccacagtgtacactaaaatgtgaaattgaaggttttgttaaaaagaaaaagataatgagcttcatgctttgtttaattacataatgatttccattacgctatttctgtgaaatgcagcaggttcttaaacgttatttcagtggcatgggctggaagcttatcacaaaaagccatgtgtgtggccttatcagaacagaaagagacaggctggtgcccaaggctgctgcctgctccaccttttgccagctctggacatctgaggacgtcccggcagatctggaatggggccctcaactgaccatttgcttctcagaatttcagtttgagacatgagaggtataatcagttacttttctccccccagagaaacccttttgtgaggggagaggagctatggtatgtggttcagctgaaacacatacaactgcatccttttggagtcctttgccaacaaaaacagaccaacagaccagatggtgtccatgttcaatatcatgtcttgatggacgcagctgatgacctcaaatacttgagtggtctcatggctgttagatggattatttgaaaaaggactccaaaaggatgcagttgtatgtgtttcagctgaaccacataccatagctcctctcccctcacaaaagggtttctctggggggagaaaagtaactgattatacctctcatgtctcaaactgaaattctgagaagcaaatggtcagttgagggcccattccagatctgccgggacgtcctcagatgtccagagctggcaaaaggtggagcaggcagcagcttgggcaccagcctatctctttctgttctgataaggccacacacatggctttttgtgataagcttccagcccatgccactgaaataacgtttaag

SEQ ID NO: 573 - DNA, 2352 bp, Homo sapiens
  misc feature (2096): n equals a,t,g, or c
gggcagacggaggctggggggaggactttgagtcctgcgaggagcggcgttatgtgcagagtgcccagtcccagatccataacacatgctgggccatgatggggctgatggccgttcggcatcctgacatcgaggcccaggagagaggagtccggtgtctacttgagaaacagctccccaatggcgactggccgcaggaaaacattgctggggtcttcaacaagtcctgtgccatctcctacacgagctacaggaacatcttccccatctgggccctcggccgcttctcccagctgtaccctgagagagcccttgctggccacccctgagaacatgcctacctgctgggtgccgtctgtgcgttccagtgaggccaaggggtcctggccgggttggggagccctcccataaccctgtcttgggctccaacccctcaacctctatctcatagatgtgaatctgggggccaggctggaggcagggatggggacagggtgggtggcttagactcttgatttttactgtaggttcatttctgaaagtagcttgtcgggcttgggtgaggaagggggcacaggagccgtgacccctgaggaggcacagcgccttctgccacctctgggcacggcctcaaggtagtgaggctaggaggttttttctgaccaatagctgagttcttgggagaggagcagctgtgcctgtgtgattccttagtgtcgagtgggctctgggctggggtcggccctgggcaggcttctcctgcaccttttgtctgctgggctgagggacacgagggcaaccctgtgacaatggcaggtagtgtgcatccgtgaatagcccagtgcgggggttgctcatggagcatcctgaggccgtgcagcagggagccccatgcccctgggtcgtgagcttgcctgcgtatggggtggtgtcatggagcctcatgcccctgggtcgtgagctcgcctgagtatggggtggtgtcatggagccgcatacccctgggttgtgagctcgcctgcatatgcagggtctgtcatggaacatcccaagtctgtgcagcagggagccccatgcccctgggacatgaacccacctgcgtggaatgctgtttgtgaggtgtctacagggtttatagtagtcttgtggacacagaaatgcacaggggacacttacggacacagaaatgcacaggggaggccgagcataaccaggggtgargggcaggcagcagttgtagttactgccgcggggcactgctatgtgcagggacagccagcgcccagcccatcaccactccctgggctggctggcaggtatggcaccctgggagcccggcatatacccagggcacccctacggctgccgccagtctcatgcccaggtgggtgctctgggctggagcgagggccaggttttgggccgaggcttccccaggcaatcctgtgagctcccttctagcctctgacccagtctggtctggcttgcatggatgtagggcttggggtgggaagttcaggtcctggctttgctttgcctgatgtggatgagcagctcacatgctcagggccacctgagactgtcactgctctcccctggctactgggaggagtcactgagagcttcgttacccctgctgccttgcccagggcacaccctatacctcctyatctgctcttcccctccctgccgccttctgggcaggtagcagtccctggcctctccccctggctgatcactctccctcaggcagtggagatctgcgtctggacaccctcagatcctgtcattgcctgcccagagtccttcaggggcacccctctgccttggtgtgcrgtccagggctctcacccaggtgccgcaccctctggggtcttctgtccagctcccttgccccatgtgctgtcactgactctccttgggactcgcctgcctgctcagagccctgcagggcttggtcagctgcctgttcagtgtcaacacttccctgcacatcttaaaactgggctttattttcgctgaaggaactgtgttgggacccttgacatctgtcaggtttgcacatgctgtttttttttctcagcccacgtgttctnccccacgtggggtagcagcaggacagacagtgaatcacagagtctgccctgagcagaggctgctgtccctgggactcctagccatggtcagactgtacaaaacggttttccagaaatgaaatgtaaatccatttttatactgaaaatgttactgaaagtcacttttatgagcatctgccttaataaacagacattgattcccttaaaaaaaaaaaaaaaaaaaaaaaaaaaaaaaaaaaaaaaaaaaaagtcgacc

SEQ ID NO: 574 - DNA, 328 bp, Homo sapiens
  misc feature (1): n equals a,t,g, or c
  misc feature (9): n equals a,t,g, or c
  misc feature (10): n equals a,t,g, or c
naagctggnnctccaccgcggtggcggccgctctagaactagtggatcccccgggctgcaggaattcggcacgagtttctttgtttgtttgtttttttctctaaaaacaaacagcaaaagacagctgaaaacaagaacttcaccggtgggcaggcaagaattctcttctggaaaatgacgtttgtggctctttcccaagttggccttcaaagagcctgcctgcygttgagccagaagatgtctcgtgtgaaggctggggtggcggctgtcttggaacctctgtgagcaggaggccctaagccgcagcagtggatagaggtgcagatct

SEQ ID NO: 575 - DNA, 1678 bp, Homo sapiens
ggcacgaggcgcccttcytcttctgtgcgctcgggctcctggtcccggctccccggttaccggggcgcgagtatgaccacaatggcggccgccaccctgctgcgcgcgacgccccacttcagcggtctcgccgccggccggaccttcctgctgcagggtctgttgcggctgctgaaagccccggcattgcctctcttgtgccgcggcctggccgtggaggccaagaagacttacgtgcgcgacaagccacatgtgaatgtgggtaccatcggccatgtggaccacgggaagaccacgctgactgcagccatcacgaagattctagctgagggaggtggggctaagttcaagaagtacgaggagattgacaatgccccggaggagcgagctcggggtatcaccatcaatgcggctcatgtggagtatagcactgccgcccgccactacgcccacacagactgcccgggtcatgcagattatgttaagaatatgatcacaggcactgcacccctcgacggctgcatcctggtggtagcagccaatgacggccccatgccccagacccgagagcacttattactggccagacagattggggtggagcatgtggtggtgtatgtgaacaaggctgacgctgtccaggactctgagatggtggaactggtggaactggagatccgggagctgctcaccgagtttggctataaaggggaggagaccccagtcatcgtaggctctgctctctgtgcccttgagggtcgggaccctgagttaggcctgaagtctgtgcagaagctactggatgctgtggacacttacatcccagtgcccgcccgggacctggagaagcctttcctgctgcctgtggaggcggtgtactccgtccctggccgtggcaccgtggtgacaggtacactagagcgtggcattttaaagaagggagacgagtgtgagctcctaggacatagcaagaacatccgcactgtggtgacaggcattgagatgttccacaagagcctggagagggccgaggccggagataacctcggggccctggtccgaggcttgaagcgggaggacttgcggcggggcctggtcatggtcaagccaggttccatcaagccccaccagaaggtggaggcccaggtttacatcctcagcaaggaggaaggtggccgccacaagccctttgtgtcccacttcatgcctgtcatgttctccctgacttgggacatggcctgtcggattatcctgcccccagagaaggagcttgccatgcccggggaggacctgaagttcaacctaatcttgcggcagccaatgatcttagagaaaggccagcgtttcaccctgcgagatggcaaccggactattggcaccggtctagtcaccaacacgctggccatgactgaggaggagaagaatatcaaatggggttgagtgtgcagatctctgctcagcttcccttgcgtttaaggcctgccctagccagggctccctcctgcttccagtaccctctcatggcataggctgcaacccagcagagggcagctagatggacatttcccctgctcggaagggttggcctgcctggctggggaggtcagtaaactttgaatagtaagccaaaaaaaaaaaaaaaaaaaaaaaaaaaaaaaaaaaaaaaaaaaaaaaaaac

SEQ ID NO: 576 - DNA, 2508 bp, Homo sapiens
  misc feature (2443): n equals a,t,g, or c
  misc feature (2464): n equals a,t,g, or c
  misc feature (2472): n equals a,t,g, or c
  misc feature (2494): n equals a,t,g, or c
gcgtcggcgkcygggcaccgccattttggccggtggccgtgagaacacgctgtgtggctgaaaagtgaaggcaagagctgatttggcctctgtgctcccctccgcaaggggatcgttttctccagaagagctggatattctttcgcccagttatggcagacaagttaacgagaattgctattgtcaaccatgacaaatgtaaacctaagaaatgtcgacaggaatgcaaaaagagttgtcctgtagttcgaatgggaaaattatgcatagaggttacaccccagagcaaaatagcatggatttccgaaactctttgtattggttgtggtatctgtattaagaaatgcccctttggcgccttatcaattgtcaatctaccaagcaacttggaaaaagaaaccacacatcgatattgtgccaatgccttcaaacttcacaggttgcctatccctcgtccaggtgaagttttgggattagttggaactaatggtattggaaagtcaactgctttaaaaattttagcaggaaaacaaaagccaaaccttggaaagtacgatgatcctcctgactggcaggagattttgacttatttccgtggatctgaattacaaaattactttacaaagattctagaagatgacctaaaagccatcatcaaacctcaatatgtagaccagattcctaaggctgcaaaggggacagtgggatctattttggaccgaaaagatgaaacaaagacacaggcaattgtatgtcagcagcttgatttaacccacctaaaagaacgaaatgttgaagatctttcaggaggagagttgcagagatttgcttgtgctgtcgtttgcatacagaaagctgatattttcatgtttgatgagccttctagttacctagatgtcaagcagcgtttaaaggctgctattactatacgatctctaataaatccagatagatatatcattgtggtggaacatgatctaagtgtattagactatctctccgacttcatctgctgtttatatggtgtaccaagcgcctatggagttgtcactatgccttttagtgtaagagaaggcataaacatttttttggatggctatgttccaacagaaaacttgagattcagagatgcatcacttgtttttaaagtggctgagacagcaaatgaagaagaagttaaaaagatgtgtatgtataaatatccaggaatgaagaaaaaaatgggagaatttgagctagcaattgtagctggagagtttacagattctgaaattatggtgatgctgggggaaaatggaacgggtaaaacgacatttatcagaatgcttgctggaagacttaaacctgatgaaggaggagaagtaccagttctaaatgtcagttataagccacagaaaattagtcccaaatcaactggaagtgttcgccagttactacatgaaaagataagagatgcttatactcacccacaatttgtgaccgatgtaatgaagcctctgcaaattgaaaacatcattgatcaagaggtgcagacattatctggtggtgaactacagcgagtagctttagccctttgcttgggcaaacctgctgatgtctatttaattgatgaaccatctgcatatttggattctgagcaaagactgatggcagctcgagttgtcaaacgtttcatactccatgcaaaaaagacagcctttgttgtggaacatgacttcatcatggccacctatctagcggatcgcgtcatcgtttttgatggtgttccatctaagaacacagttgcaaacagtcctcaaacccttttggctggcatgaataaatttttgtctcagcttgaaattacattcagaagagatccaaacaactataggccacgaataaacaaacttaattcaattaaggatgtagaacaaaagaagagtggaaactactttttcttggatgattagactgactctgagaatattgataagccatttattaaaaggagtatttactagaattttttgtcatataaaacttgaatcaggattttatgccccacatactctggaacttgaagtataatatacttaatataacataaaaagccagttgggttctaaattgtagttgaaacacagaaaatgccacttttctgttcctgaagaggctcttttgtgcataatattctaaaatgaagacatttcaagctatacaaattacttccaagttttcatgatgtatgggaagattttcagtaggtgtattatattcacggtaccaaatgctgaccagtgttgctccattttttaaatcttgaaaagggtttctgtacttacctggtttgccaagtatgccagtgtaatgaaactgcccttattttaaaagccagtcaaagattccactgattgacatttgataaataaacatcaggattawgtttatgttggtttccacnccttggcctatttaccatttnggtttccnagaaaatttctacggcaaaccncttttggaaaaagg

SEQ ID NO: 577 - DNA, 1531 bp, Homo sapiens
  misc feature (431): n equals a,t,g, or c
  misc feature (433): n equals a,t,g, or c
  misc feature (435): n equals a,t,g, or c
  misc feature (1525): n equals a,t,g, or c
  misc feature (1530): n equals a,t,g, or c
  misc feature (1531): n equals a,t,g, or c
ggccgcctgctcctcatgacccaagcaaagcagctgcagcgrccgcggaccccaacgcygcgtgggccgcctactactcacactactaccagcascccccgggccccgtccccggccccgcaccggcccctgcggcccaccggctcagggtgagcccctcagcccccacccaccggccagtcggactacactaaggcctgggaagagtattacaaaaagatcggccagcagccccagcagcccggagcgcccccacagcaggactacacgaaggcttgggaggagtactacaagaagcaagcgcaagtggccaccggaggggtccaggagctcccccaggctcccagccagactacagtgccgcctggsgaatattacagacagcaggccgcttactacggacagaccccaggtcctggcggcccccagcngncncccacgcagcagggacagcagcaggctcaatgaatcgaatgaatgtgaacttcttcatctgtgaaaaatcttttttttttccattttgttctgtttgggggcttctgttttgtttggcgagagagcgatggctgccgtggggagtactggggagcctcgcggcaagcagggtgggggggacttgggggcatgccgggccctcactctctcgcctgttctgtgtctcacatgctttttctttcaaaattgggatccttccatgttgagccagccagagaagatagcgagatctaaatctctgccaaaaaaaaaaaaaaacttaaaaattaaaaacacaaagagcaaagcagaacttataaaattatatatatatatattaaaaagtctctattcttcaccccccagccttcctgaacctgcctctctgaggataaagcaattcattttctcccaccctcggccctcttgtttttaaaataaacttttaaaaaggaaaaaaaaaagtcactcttgctatttcttttttttagttagaggtggaacattccttggaccaggtgttgtattgcaggaccccttcccccagcagccaagccccctcttctctccctcccgccctggctcagctcccgcggccccgcccgtcccccctcccaggactggtctgttgtcttttcatctgttcaagaggagattgaaactgaaaacaaaatgagaacaacaaaaaaaattgtatggcagtttttactttttatcgctcgtttttaacttcacaaataaatgataacaaaacctccccgtctgcgggtgctgtctgtctccccccctttccttccctccctgtagttttgaagcggatgtttgttctttatagatgttgtttaaaaagcctgataatggtgattgaaatttacaaactttgtgtttttttttttttaagaaaaatataaaatagttttcttcaggctcaatgtgctttcctaaccgtgccccccccccctttttttttttgttaaataaagtgctttttgtttaaaaaaaaaaaaaaaaaaaaaaaaaaaaaaaaaaaaaaaaaaaaaaaaaaaaaaanaaaann

SEQ ID NO: 578 - DNA, 1244 bp, Homo sapiens
gtgggagactacagagttggggctccccaacccccaggggttaacatgactcccctctgacaataatgggtgacctgtcactgtttttggtatttgatatcttaaccccattctcccagagaatacaattcatggaaatttttacctaacttggcatggggttcatggagctcaggttaggaggcccagaactggagagctaaggcatacttcatcagcttagcacatgacgactgtctctccagactgcgtggagtgcatggcgtgttcagacaacacagttcgtgctggcctgacacccaagttcattgatgtgccaaccctgtgtgaaatgctcagctatacccctagctccagcaaggacaggctctttctcccaacacggagtcaggaagacccctacctctcaatctatgacccccctgtaccagacttcaccattatgaagacggaggtccctggctctgtcactgaatacaaggtcttggcactggactctgccagcatcctcctgatggtacaggggacagtratagccagcacacccacaacccagacaccaatccctctgcaacgtggtggcgtgctcttcattggggccaatgagagtgtctcactgaagcttactgagccgaaggacctgctgatattccgtgcctgctgtctgctgtaaaggctgcagcctccccagctctcctctgccagccaccctaaattccagccaacctcacctcctcgggcccagctcaagcccccttccttgctctggaccccttaggtataccctggaagagctggggtgggggaggagggagcgtgaaggtagtgactcctgaacacacccaggtggaaccatctttggggaggagaggcccgtgtgaggggtctgatactccctttgtcttccctctctactcctcgctacacctgagccaggctcttgccaactctgttccagcctatggctttaggctagctgttaaatatgtgacccagcattagctcagcatctgtcagagcaagagaccaggtaatttctaagaacagggttctagcgatgggactgcccatttcctcagctgcagaggaggaaagggaaagggtaggcctgtagactaacgctgtttacacccttgttctgtcaaagcaattaaagatcacttgtgttgaggctgtggggtaatgagcactcagcctttggggtacctgttcctaaagtgggccaaaagagccctccctacaaa

SEQ ID NO: 579 - DNA, 2525 bp, Homo sapiens
  misc feature (22): n equals a,t,g, or c
  misc feature (76): n equals a,t,g, or c
acggggatggggtcccccaagnacgccttaagaagaaagcacacagttaggattacctgtgggctagcatagaggnaaggataatcctgaaggttggagtcttaacatctgggactcctgaacttctgaagactgacttctcttgggggtttaggcatggccagcattgacagcagtgcccctgaaacaacatcggatagttcccccaccttaagccggagaccacttcgagggggctgggcccccacctcctggggtcgaggtcaggacagtgacagcattagcagctcttcttcggactccctgggctcctcatcctccagtggaagtcgccgggccagtgccagtggaggagcccgggcgaagactgttgaagttggcaggtacaagggccgccgccccgagagtmatgcccctcatgtacccaatcagccatcagaggcagctgcacacttctacttcgagctggcgaagacagtgctgatcaaggcagggggcaacagcagcacttccattttcacacatccatcttcctcagggggccaccagggtcctcaccgcaacctgcacctttgcgccttcgagattgggctttatgccttggcctgcacaactttgtttctcccaactggctctcacgtacttattcttcccacgtttcctggattacaggccaggccatggagataggcagcgcagccctgactatactggtagaatgctgggatgggcacctgacaccccctgaggttgcatccctggctgacagggcatcacgggcaagagactccaatatggtgagggcggcagcagagctggccctgagctgcctgcctcacgcccatgcattgaaccctaatgagatccagcgggccctggtgcagtgcaaggaacaggacaacctgatgttggagaaggcctgcatggcagtggaagaggcagctaagggtgggggcgtgtaccctgaagtgttgtttgaggttgctcaccagtggttctggctrtatgagcaaactgcaggtggctcatccacagcccgtgaaggggctacaagctgtagtgccagtgggatcagggcaggtggggaagctgggcgsggtatgcctgagggtagagggggcccagggactgagccggttacagtggcagcggcacagttkacagcagcagccacagtggtgcccgtcatatcggtggggtctagtttatacccgggtccaggactggggcatggccactcccctggcctgcacccctacactgctctacagccccacctgccctgtagccctcagtatctcactcacccagctcaccctgcccaccccatgcctcacatgccccggcctgccgtcttccctgtgcccagctctgcatacccacagggtgtgcatcctgcattcctaggggctcagtacccttattcagtgactcctccctcacttgctgccactgctgtgtctttccccgttccttccatggcacccatcacagtacatccctaccacacagagccagggcttccactgcccaccagtgtggccttgagcagtgtccatccagcatccacgtttccagccatccaaggtgcctcactgcctgccctgaccacacagcccagccctctggtgagcggaggttttccaccgcccgaggaggagacacacagtcagccagtcaatccccacagcctgcaccacctgcatgctgcctaccgtgtcggaatgctggcactggagatgctgggtcgccgggcacacaacgatcaccccaacaacttctcccgctcccccccctacactgatgatgtcaaatggttgctggggctggcagcaaagctgggagtgaactacgtgcaccagttctgtgtgggggcagccaagggggtgctgagcccgtttgtgctgcaggagatcgtcatggagacgctgcagcggctgagtcccgctcatgcccacaaccacctgcgtgccccggccttccaccaactggtgcagcgctgccagcaggcatacatgcagtacatccaccaccgcttgattcacctgactcctgcggactacgacgactttgtgaatgcgatccggagtgcccgcagcgccttctgcctgacgcccatgggcatgatgcagttcaacgacatcctacagaacctcaagcgcagcaaacagaccaaggagctgtggcagcgggtctcactcgagatggccaccttctccccctgagtctttcacccttagggtcctatacagggacccaggcctgtggctatgggggcccctcacacagggggagtgaaacttggctggacagatcatcctcactcagttccctggtagcacagactgacagctgctcttgggctatagcttggggccaagatgtctcacaccctagaagcctagggctgggggagacagccctgtctgggagggggcgttgggtggcctctggtatttatttggcatttataaatatataaactccttttttactctaaaaaaaaaaaaaaaaaaactccaggg

SEQ ID NO: 580 - DNA, 4006 bp, Homo sapiens
tcgagttttttttttttttttttttttttttttttttttttttttttttttttttttttttctgaatagagaatatttataacttttgtatgagagagaattcacactcaacaagacactaccagcaccacgtttacagaggatgaaaacacttcacagtctcccagagccgatcgtcctctcccccgccccaccccgtgcttcagccttgcagggagagtgatgctccaggcaacacggttctgagtcaccttctgacacgagctccctctgcttgctttccaggtcttgaaaatctgaattcacttcagtttagtttatgaattttaggtttcatgataagcctcaaktgtagttggacttttattgaatccttcctaagttattgaaaaaatgtcttttcatggtgaatgacaatatttatgttgcctttagcttcttgaagatttagaagttatataaaaaattaatttaaaagcaaaccaaaagaggtttccattaacattatgatttaaccattgtatttaatttcccaccttatgaaacacaacagcagctccctgactggttcgcctttcattgtgtgaggtcggcacttggactcactcagaactgtcgctcacctgtggctgacacacccagccctggaaacggggccccagacgccacgtcgggatttctgacatgctcagcaggtagaccagaggccgtgtgaccagctcagtgctggtttacggaacaactcttacttttaaaaattacttgttcccccaaattgttgagtgccgccgtttggtttcctatgttttctttccctgttttgattttgctgaagggagaggtggtggtggttaggatcagagctctcctggcatccgtggggaggatttgctggtggtggcttcgggctyatgccagacacactcactgccccgtctgtccaaggcctccccttcccctttgctggtgggaggagctcgtgtgctccttggccgcttactggaagggcgtttttcagagctgcagggacagggtgagcagctgaagggctaggagggaagccggcccccgctctgcagaagctgcatttcagctgaatctgtgtttcagcctcagttggttgcaccgttagcccctctcctcccggatggtcatgtttttgtcacattagagaataaacagccacacacacatttttttttttcctttaaaacagtaacttggaaatatgaaaaggccagaaggaggagcaagggctgttttctggagtggttgaggtgttgtcctgcagttgtcattgtcttctccaccgggctgttcccatttatttcctgtggaactgaatccctcctccctccactccttgggagcccaggtggtccttggccaccattcaggctttccaagaagccaaccaccttggagattttttttcttgaatttcgctgttttcttctgcttcctttagataaaaagcagctcaagagaccttatcttagggatgagaaaaacatgcatattaattccatctgagtgattgtcagtgtaaggccttttaaaacaaaagcaagttctttgttaggaattggtcaaaattcatctctttctttargcccatcaactcccaggacggtttgagttactcagttacctaagcttgctattcatccaaatcattttctagagtcactgtataagggtctatgagtagctgtgtatgaataaatattacctgtctacctcaaaatacacatactctgaagcattctgtacaaccgtgtgttatcacagtgcagttttaagtgtaacgttagaacttaggcattttcctgtgtggcggaataagaaaggattaaacagttacaagcctccaaattcaaataaaattaaatcacagttcagatgaaactgaatatcattgtaataatctcataatatatatttgtaactttgtagctatctttgaaatcacttgactttgcaatggtgctaagctgatagatttaaatacacagacgggcgagtggcgcccgtgtcgatgtcttcagccagtggtgaccctgcttttgtaaccgcgttaacctgacaaaacctcagcagcagaartccctatttttctargartcatcgtgcagacagtcttcactacaggactygccctggggcctctgcctctcgtctgaccttgcagccttagtcgttggaggctggagcgcaatggccctgccgtctgtggagcctctgggcggccttctttcctttctgtcaacctctcatttcacagmaaaaggctgaatttcattttttccagcatgaaagccaggatcggttagtggttggattctattggttttttttttaaacagatggagttactgtgaagaagttttcacaactatttatgctggtaaaacaaatgctgttaaatcaccttatgcgtcgttttcaacagcagtggggctaattacccggaatacggtctcaccgatgcagttttcatggacatagaaaattcaaatagaatatataatattgaatttaagatttggggggttaaaaaagaaaacttaactttataaaattatttattctattttaagccttctatcatattttcccatccaattgtttggtttcagtggtccagctttatttacaggcatataaaatgaaattgtgagatgttttgcaagcttctttttactttgagtagcttttaatttgtatgtttttatgtggatgaagagcattttttatgcttttgtgcaataggttccaatatgcatttattagacatctgtttaaatggtaatgtagcatttattttgctaaattgaaagggaacatagatggaattccaaaatatgtacattcagctgtttggtttttcgtttttcattgttattattgtgagaatgctgttattggggttgtgtgtgagtgcccgtcagccagtgatgcctcgggccacgctgtggggccacctcagtcctgcctgggtcctggtgccttggaccccacgtgcttgtggccaggctgcccctgggcggggccatgtggcctcagaccacaagagcggagctgccctggcccaagcactgcagctgcctgcacccccgggcttcgcagccttgcttgttttctctgaacagcaacagaacagtgttcacagcgattcaaagggtggcattgggttggacgttctgggtacaagccaacctagtcccacgttgtacgtgaatgtttaatgtgctctcaaaacatggaaaataagtttagtgcacatagctaaatcacaaaacatccaatttctctgtttcctcaggaagtcattactgcgccaccacatcacatgaccttaacatgatcaatgtatttctctgccttgacatttaaatacataaattgagataagtagattagaaaatcattcaaatgataccataatttgtacgggacagggtgcgggcaatggccacgtggccaaggccccgcaggaacgcgccgaggtctccctcaccctccaggtgtccttcgcacccaacagtgcgtctgaggaacgagctgcagtttgagcgttcccctgagatgtgcgtagcctccgtgtaaatgtccactcccatggcttaattgcctatcagacgcattttcccagacgaaagcaatgttgggttggggaagacagtgcagccacccagcctttaccagcagcgtacggcagacgaaggcagtcgaggtgtggaggtgatcacgaagatacatgtgtttgactgtttaatttgaaagtttacattttttatgctttgtgttggtgtgtaatttttgtactcttggtggctagtttttgtcaaatcttttttggaatattgcttaaatgttttgattttatgatagtgaagcttgtattcagtgttttgccaattaatattatatgcttgtaataaaagcaaaagaaaagcttaaaaaaaaaaaaaaaaaaaaaaaaaaaaaaaaaaaaaaaaaaaaa

SEQ ID NO: 581 - DNA, 565 bp, Homo sapiens
gagtgggcggagtgccggggtcagttggtccaastgtcccggcctgaggtgtcggccggatccctccttctcccggcgcctcaagcggaagaccattcctcaagaattttgtatccaaggcccaaaagtttgttacccaagatgatgaatgctgacatggatgcagttgatgctgaaaatcaagtggaactggaggaaaaaacaagacttattaatcaagtgttggaactccaacacacacttgaagatctctctgcaagagtagatgcagttaaggaagaaaatctgaagctaaaatcagaaaaccaagttcttggacaatatatagaaaatctcatgtcagcttctagtgtttttcaaacaactgacacaaaaagcaaaagaaagtaagggattgacacccttctgttttatggaattgctgctgatcattttttctttaaaacttggatagattccaaaagttacagtacctttgtggcttcattggaatatttatgraggrtaatgtcaggatgtwgggacmaaaattaamcacawtaacmggagacttcctaaggtttgt

SEQ ID NO: 582 - DNA, 2528 bp, Homo sapiens
aagattggaacgatctcagccaaatattttaggtgtaattcatatgtatttgagtggaggattttttttctcatttttctagtgttaaattttaaccagcattaacatggtagagtggaggagtgagtgtgttcaaagatcaacatatttaacttttaaacactatctcaaagccagcataattaactactttgattgtgggctgacctttgtttttttaacaatcaggcatttttaattagataatccactcatgtatttccccctcactgcagttgtctgcatttttagcctcttttctcttcgttagttgtcagaatatgccttcgtcaaggctcagaggtaacaagacagaaaattcatctgggattttcctgctgtggctggcacattcttctgattaacagacacttgtatgatgctttaggctagttagtgcattttttagcaaacatttatcttaaacatcacagatccactggggggtgcaaggggctactgttagtcctcttgttagatgcagtcactcctcctggtcacctagtgagcagggacagagccaggagtcaagtgcagtgccaaggtgcatgaccctctgagaagtcactgggctgatttgacctccgactcattggttgtgcaaatgccatgtgcagcctttcctgaggccataggagggcttcctgcagctgagatctatgcaggccatcctctcaacargtgccactccaagggcggtcctcggtgcagcagcakcagcttcacttgtgggggggtgggggaargggcggtctcagaaatgcaggttcccaggtcccaccctggacttctgaaggggtgtggcatctgtgtttctgatgcttactacaatatgtgaaccactactttagaaaatctgctttaacttggtattcctctaattgtgttccctaggaaatgactgtcccaagagccagtgattattccaggtgttccctggaaaggtcaagtgagtctgggaaacactatgtctgtacacctcttgaaggtgtcgaatgtatgtttatacatcagtggaacccatttttctagcctagcaagtcccaaacacattacactgaagagattttggtgaggaaacttgctggagttttcagggaacactgttctaggcttaggtgaccttaggatcactcaagtagacccttcactccctgcgagaaattaggatgaataactacctgtggcattgttggttctgaacttttacagttcaggcctgctgtgaatctttgatgaagctttaaggtgacactgttgtacaagatgtcagctttgctgaaacgcacattacctggaataagtgctttaattgtagaattagaatgggatttactgtactgttttaaatgagattggcttcagaatccattacagttaccttacatagcacttgatacgtgttaaatgaacatatgaatgtaatttatatattcctagaatttaagttactttgtgagatttgggcctgtccctcaaygccagtttaggatttctttttttctataccttgaaatgattataaaatagattttcatgggaattttaaaaactctatccaaaacatttttggagcattttaaagccccatacacagaagtatacgaaagcacacaaaacactccaagtttcagcagttttagcgccaccattaacccactttgcttgtctcatgaaaaatctttgttaaagtttgtacacaggtaacaaaaagttactttaaaagatatataaagggctgtaagctaattgtggtgtctagtaagtagcataatgagatgtgaggagttggaactttgcgtgttttgcgtattttcatctgcattcagcttcttactctgggtttgtactcgagtgttatttctttacaaatgcccttgtaattaccactctgaagtctgctgactgtgtctcttgaacatacttaggatattctgcacattatggaaaaaggtaaattttagaagtttctgctctactaactgtagatatttatgactctgcgagttatctatttttataaccacctgtggtccattgttcattttaattcacatttcttatgaagtatggtaacagggagggagacacctagattagcagctcaatttgtactacttcagccaatctgtgaatgtaaaaactacactgttgccttgctaggatccaccctcctataatatggaacaaatatctgaatgaaatccaccctaggagacggagtcaaactaaacttgtggtttttcatttaacttttgactacagcatggccccatggcatccacaccaagagggtgttgtgatgaggtgccggtgtgcaaagggaactttagtttttccactggttcttatctgctagccttttacatacatgtgtactatatttgtttatagactgtaggtggatatataatttaaaagcttgatttaataaacatttaaccccctaaaaaaaaaaaaaaaaaaaaaaaaaaaaaaaaaaaaaaaaa

SEQ ID NO: 583 - DNA, 507 bp, Homo sapiens
  misc feature (465): n equals a,t,g, or c
  misc feature (485): n equals a,t,g, or c
  misc feature (493): n equals a,t,g, or c
  misc feature (501): n equals a,t,g, or c
ggcacgagctcctgccttagcctcccagagtactgggattacaggctctttctttttaaacataaaagttttaaattggtattaactctgtactctgccctagattgttttagcttctgttctgtaatcatgagtttggttggagatattctccatagatgatcttctactgaaatgcctaaagaagtcacaggctggcttctgttttattcagggatttttttaaaaagtcaatcagaaaagggatactggagcttcttcatgtatgtaacagcatattaaactggagacagtgatgaatcagctacaaaggtaatattgtattaaaatcatgtttaagatagctgcttttatgtgtattttatattgcatgcttttgtaaaaacatgctgggtgatgaaagattagttttagagagaaaatgttcatctgtgcagaggatgcatttcttccattaattctggnaaaaackttttttccctttngggggggnaaaaaaanaaaaaa

SEQ ID NO: 584 - DNA, 1931 bp, Homo sapiens
  misc feature (2): n equals a,t,g, or c
  misc feature (8): n equals a,t,g, or c
  misc feature (21): n equals a,t,g, or c
  misc feature (1871): n equals a,t,g, or c
  misc feature (1899): n equals a,t,g, or c
  misc feature (1907): n equals a,t,g, or c
gntagaantgggggttttccnccattgggggttcagcwcgmggaacycctgacctcmggtgatccacctgccttggcctcccaaagtgctaggattacaggtgtgrgccaccacacccggccccagartaatggtttcttgactttctgtagcccttgttccttagtctgctgtgatatttatgttgacctttatcattttctattctgaacccctcttagcatttaatgtgaaatctaagaaattagaagtagaatggcttttattgttttgacacctttgaaattattattaataatttttccagagcaaaaaagcaaacacgctcaataagactaaacaaaacaaaatataaatgtacatcatttaatgtcccagtggctctattctacctgtaagaaaatgatacaaaaccacctaagatattttgaagcctgacaaatcagcttcatggaaaaaggtaaaaaatgcatttttcaaccgaaagggcagatccaatagaagacccgctccttaaataaacataaaatgtaaaaagttggaaaattaagagtaatgttccatctggaaactgaacttttgtccttgaacttgtgttggcaccaagcctcatacacagtgagctcaataactgttgggacaaaggaaggaaggacaaaatgtgtaacttcccagcatctgggagatgctgtctcttgcctcactgagtgttccttttctttgctctcatgtcattccctgagaacaatgaattctgggacaggctaaacatcatgatgaagtttcttaaacagactttcttagtggaaatccatttagatctgggtgtgctctatggggagtgctgacgtcaaagagcaaatgtctataaggggcccttttaaaatgaacattttcctcattgagcaagctgggattctctaatgtagaaatcaagccatctttataatttcacttcagatgtttatgtttttgttttttttgtctccaatgatggtaaaaataaaaactacgcattacttaaaggagtttccctcacatgtaaacactgttaggaagtctggattaagttgaaagtcctgttttaactttttttctctcatataccaaacactctgtatttctcttaaagaagccctttaagagaaagccctaattttatatctgacagtaaagtttgctgcaagtgtatgagttcaaacacatcccttgttttctgtccctaggggaaaagtcatgtagttttagcttggctccagtgttaatattatattcagtagcagccttagaagagtggtctaagacttgaacctggagcaattttatagcacagaatcctacgaagataggactgtgaacatttgttttctttttcgtgtgtgtcaaactaactggtttttgctttaccaataaaatgtcctcggcagagtaaattttaaacgtgaaaattatagatcttgatattgaatccatcagtgattcaagagatacacctatttgcctaaaacaacctaagatgtattggttatggaatcatgtgttggataggttcttaagacctgtttcctcaaatcttgacacagttttcaagggtggcttattgacttgcacggttgggcagataatccagatttacctaagattgggtaaaaaagtcatctgtgactttgctggcagggcatttgctaagtggagtacaggatctaaaagggttttcttagaaagggcaatattgtccaatgaagtaagcaraaggactctgggttagaarcatctgcacaaaaactggtgaaaactactctccctgctctgcaactggattggtgattgcaagctaaacatgggggaaacagttttaacaacagggaatncttccagtcctgtttttttaaaaaaacnttaaactnttgttctttaattcccaagtcccc

SEQ ID NO: 585 - DNA, 1020 bp, Homo sapiens
  misc feature (1006): n equals a,t,g, or c
  misc feature (1018): n equals a,t,g, or c
tcgtcctcctggcccgctcctctcatccctcccattctccatttcccttccgttccctccctgtcagggcgtaattgagtcaaaggcaggatcaggttccccgccttccagtccaaaaatcccgccaagagagccccagagcagaggaaaatccaaagtggagagaggggaagaaagagaccagtgagtcatccgtccagaaggcggggagagcagcagcggcccaagcaggagctgcagcgagccgggtacctggactcagcggtagcaacctcgccccttgcaacaaaggcagactgagcgccagagaggacgtttccaactcaaaaatgcaggctcaacagtaccagcagcagcgtcgaaaatttgcagctgccttcttggcattcattttcatactggcagctgtggatactgctgaagcagggaagaaagagaaaccagaaaaaaaagtgaagaagtctgactgtggagaatggcagtggagtgtgtgtgtgcccaccagtggagactgtgggctgggcacacgggagggcactcggactggagctgagtgcaagcaaaccatgaagacccagagatgtaagatcccctgcaactggaagaagcaatttggcgcggagtgcaaataccagttccaggcctggggagaatgtgacctgaacacagccctgaagaccagaactggaagtctgaagcgagccctgcacaatgccgaatgccagaagactgtcaccatctccaagccctgtggcaaactgaccaagcccaaacctcaagcagaatctaagaagaagaaaaaggaaggcaagaaacaggagaagatgctggattaaaagatgtcacctgtggaacataaaaaggacatcagcaaacaggatcagttaactattgcatttatatgtaccgtaggctttgtattcaaaaattatctatagctaagtacacaataagcaaaaacaaaaaaaaaaaaaaaaaaactcgagggggggtcccgtacccaatngccctctcatgnat

SEQ ID NO: 586 - DNA, 767 bp, Homo sapiens
  misc feature (617): n equals a,t,g, or c
attcggcacgwgctcctctccgtcagtgcggtttcgcctttatggtggtggagtctgcccaggctgtggaccgcaaataaccctgtacaaagaggaatggagattgcctctatccacctagattcataagctggcctgaggtgatcttggcatcaaggaagggatgcacatcatcacaccatcagcttcagagaatggcagccatttatttgtcccgtgggtttttttccagggaaccaatctgcccttttgaagaaaagacaaaggtagaaaggatggtggaggactacctggcaagtggttatcaggtaagcagaaaacgtactgttgttaaaaatgayatgctttcatccaataggtagacagawttctttctagacagactcatcttcagagttttcttagagcaaatgaagccttactcaaggactgagtccccagatgaatttccccagggaatgaagtctcctatacataaartgttaacttgaaaatcagtccagtagctcagtaattactacttaagcttgaccttcatggtgccaactgcatctttcttacattgctgggtgcrgtgacrgatgataaagcwgatgaaagtgtccttttatcaaatnattcacttatcagcatttatcaggtatctgcagtgtgctgaggagtgtgckgcatagacaccaatgggacaggaagagctcctarmctggttgtgctgagatmaagygtaagcagtgtgcagtggstcatgcctgtaattccctcgtgcc

SEQ ID NO: 587 - DNA, 847 bp, Homo sapiens
ccttcttcattgatcataacacaaagactacaacctgggaagatccacgtttgaaatttccagtacatatgcggtcaaagacatctttaaaccccaatgaccttggcccccttcctcctggctgggaagaaagaattcacttggatggccgaacgttttatattgatcataatagcaaaattactcagtgggaagacccaagactgcagaacccagctattactggtccggctgtcccttactccagagaatttaagcagaaatatgactacttcaggaagaaattaaagaaacctgctgatatccccaataggtttgaaatgaaacttcacagaaataacatatttgaagagtcctatcggagaattatgtccgtgaaaagaccagatgtcctaaaagctagactgtggattgagtttgaatcagagaaaggtcttgactatgggggtgtggccagagaatggttcttcttactgtccaaagagatgttcaacccctactacggcctctttgagtactctgccacggacaactacacccttcagatcaaccctaattcaggcctctgtaatgaggatcatttgtcctacttcacttttattggaagagttgctggtctggccgtatttcatgggaagctcttagatggtttcttcattagaccattttacaagatgatgttgggaaagcagataaccctgaatgacatggaatctgtggatagtgaatattacaactctttgaaatggatcctggagaatgaccctactgagctggacctcatgttctgcatagacgaagaaaactttggacagacgtcgaccggccgctaatttagtagtagtag

SEQ ID NO: 588 - DNA, 2158 bp, Homo sapiens
ggctggccgctccagcctcccggcccgcttgctggctgcccagctgctaggacagtttgcagagcagtggcgtgcggagcggcggcggaccacctccaggggctaagtgatggatcttgtactccgtgttgcagattactatttttttacaccatacgtgtatccagccacatggccagaagatgacatcttccgacaagctattagtcttctgattgtaacaaatgttggtgcttacatcctttatttcttctgtgcaacactgagctattattttgtcttcgatcatgcattaatgaaacatccacaatttttaaagaatcaagtccgtcgagagattaagtttactgtccaggcattgccatggataagtattcttactgttgcactgttcttgctggagataagaggttacagcaaattacatgatgacctaggagagtttccatatggattgtttgaacttgtcgttagtataatatctttcctctttttcactgacatgttcatctactggattcacagaggccttcatcatagactggtatataagcgcctacataaacctcaccatatttggaagattcctactccatttgcaagtcatgcttttcaccctattgatggctttcttcagagtctaccttaccatatatacccttttatctttccattacacaaggtggtttatttaagtctgtacatcttggttaatatctggacaatttccattcatgacggtgattttcgtgtcccccaaatcttacagccatttattaatggctcagctcatcatacagaccaccatatgttctttgactataattatggacaatatttcactttgtgggataggattggcggctcattcaaaaatccttcatcctttgaggggaagggaccgctcagttatgtgaaggagatgacagagggaaagcgcacagccattcaggaaatggctgtaagaatgaaaaattattcaatggagagtttacaaagactgaatagattattgcccagttattcttaagtaaggacaaagaaggaaatatcatcgtatttcttttttttaataaggaaaaaataatctccatacagtcaagatacatagtaaatggtatcatttggaaatcagcatcgtgggcactgctgaggaatgatcctagtggtaggtcagaagaagatgctgtgaacaccaggactttaatcttatgcttaaaatgccagatgttgttcgggggacaacttgtatctttctagcagcagatctgtagtttgtatagcctcaacaacaattttaaataagatggagaataaattattgaggggactaggctatatgcatttgccttcatccacccatgtttattaagaatcattgtgcttaataataccaagactaagcaccataaccaagaaatactaatgtaaagattgtttcttgtttcaggaatggttaattcttcaacgttggtatgataatgataacttgttttgacttgaataaagtactacatcagtgtggaaaaaaattctgatacattagcagctatgtaaatgacctaattgatagcaggtgtaataagactatcgtcttcctacacataggaggctcattctctggacacactatcacctattacattttactgattaacaaataaattggaatttaaaaatatcgatatcaccatgatttaatccagatctgggattatgtagctaaacattgtgatgattattatttaaaaccattatttaataagagtaaaaatatgtgaatctggatatatttaaaaaaagaaatttgatgcccagataatatattaggcactactgattttttagttaaattgatgcactacacttttgatgtttgaagttacaaacctgtaatttttttgtaaaggaaataattgccaaatacctaggcccattgctgacgattagttctaaaatcttattcctcctcttctcccctcacttttccctacttcctctgcaaaaagatttaacaaatacattcataaggaaatgtgtgttgtaacaaatatattgcaaaaacatagtttgtaaaggcattctataagctatttatgtaaaatcaataaaagttgatcataattaaaaaaaaaaaaaaaaaaaaaaagtcgacgcg

SEQ ID NO: 589 - DNA, 2299 bp, Homo sapiens
  misc feature (342): n equals a,t,g, or c
  misc feature (772): n equals a,t,g, or c
gggcacgagctgctgtgctgggattattttctgcaactagacaaaaaacccacaaaactccacatggtttgttctcaagcaactggaatatggaaaggcttgaaggaatacttacactttttgatggaaggtaatgaccttagttcttcagtatttattagaactccatccggcacaacctgtcactgcatagtcgattcatgcgggtccagaatgagggaactggcaagagctcttggtggatcatcaaccctgatggggggaagagcggaaaagccccccggcggcgggctgtctccatggacaatagcaacaagtataccaagagccgtggccgcgcancaagaagaaggcagccctgcagacagcccccgaatcagctgacgacagtccctcccagctctccaagtggcctggcagccccacgtcacgcagcagtgatgagctggatgcgtggacggacttccgttcacgcaccaattctaacgccagcacagtcagtggccgcctgtcgcccatcatggcaagcacagagttggatgaagtccaggacgatgatgcgcctctctcgcccatgctctacagcagctcagcsagcctgtcaccttcagtaagcaagccgtgcacggtggaactgccacggctgactgatatggcaggcaccatgaatctgaatgatgggctgactgaaaacctcatggacgacctgctggataacatcacgctcccgccatcccagccatcgcccactgggggactcatgcagcggagntctagctwcccgtataccaccaagggctcgggcctgrgctccccaaccagctcctttaacagcacggtgttyggaccttcatctctgaactccctacgccagtcttcccatgcagaccatccaagagaacaagccagctaccttctcttccatgtcacactatggtaaccagacactccaggacctgctcacttcggactcacttagccacagcgatgtcatgatgacacagtcggaccccttgatgtctcaggccagcaccgctgtgtctgcccagaattcccgccggaacgtgatgcttcgcaatgatccgatgatgtcctttgctgcccagcctaaccagggaagtttggtcaatcagaacttgctccaccaccagcaccaaacccagggcgctcttggtggcagccgtgccttgtcgaattctgtcagcaacatgggcttgagtgagtccagcagccttgggtcagccaaacaccagcagcagtctcctgtcagccagtctatgcaaaccctctcggactctctctcaggctcctccttgtactcaactagtgcaaacctgcccgtcatgggccatgagaagttccccagcgacttggacctggacatgttcaatgggagcttggaatgtgacatggagtccattatccgtagtgaactcatggatgctgatgggttggattttaactttgattccctcatctccacacagaatgttgttggtttgaacgtggggaacttcactggtgctaagcaggcctcatctcagagctgggtgccaggctgaaggatcactgaggaaggggaagtgggcaaagcagaccctcaaactgacacaagacctacagagaaaaccctttgccaaatctgctctcagcaagtggacagtgataccgtttacagcttaacacctttgtgaatcccacgccattttcctaacccagcagagactgttaatggccccttaccctgggtgaagcacttacccttggaacagaactctaaaaagtatgcaaaatcttccttgtacagggtggtgagccgcctgccagtggaggacagcacccctcagcaccacccaccctcattcagagcacaccgtgagcccccgtcggccattctgtggtgttttaatattgcgatggtttatgggacgttttaagtgttgttcttgtgtttgttttcctttgactttctgagtttttcacatgcattaacttgcggtatttttctgttaaaatgttaaccgtccttcccctagcaaatttaaaaacagaaagaaaatgttgtaccagttaccattccgggttcgagcatcacaagcttttgagcgcatggaactccataaactaacaaattacataaactaaagggggattttctttcttcttttgtttggtagaaaattatccttttctaaaaactgracmatggcacaacctctgcggacaccgagaagctgatccgcgagaaagacgaagagctgcgccgcatgcaagagatgctggagaagatgcaggccca

SEQ ID NO: 590 - DNA, 2180 bp, Homo sapiens
  misc feature (1353): n equals a,t,g, or c
gtgcaaagaaggccaagcctgccatgccacaagattcagtcccaagtccaagatccctgcaaggaaagagcaccaccctcttcagccgccacaccaaggccattgtgtggggcatgcagacccgggccgtgcaaggcatgctggactttgactatgtctgctcccgagacgagccctcagtggctgccatggtctaccctttcactggggaccacaagcagaagttttactgggggcacaaagagatcctgatccctgtcttcaagaacatggctgatgccatgaggaagcacccggaggtagatgtgctcatcaactttgcctctctccgctctgcctatgacagcaccatggagaccatgaactatgcccagatccggaccatcgccatcatagctgaaggcatccctgaggccctcacgagaaagctgatcaagaaggcggaccagaagggagtgaccatcatcggacctgccactgttggaggcatcaagcctgggtgctttaagattggcaacacaggtgggatgctggacaacatcctggcctccaaactgtaccgcccaggcagcgtggcctatgtctcacgttccggaggcatgtccaacgagctcaacaatatcatctctcggaccacggatggcgtctatgagggcgtggccattggtggggacaggtacccgggctccacattcatggatcatgtgttacgctatcaggacactccaggagtcaaaatgattgtggttcttggagagattgggggcactgaggaatataagatttgccggggcatcaaggagggccgcctcactaagcccatcgtctgctggtgcatcgggacgtgtgccaccatgtctcctctgaggtccagtttggccatgctggagcttgtgccaaccaggcttctgaaactgcagtagccaagaaccaggctttgaaggaagcaggagtgtttgtgccccggagctttgatgagcttggagagatcatccagtctgtatacgaagatctcgtggccaatggagtcattgtacctgcccaggaggtgccgcccccaaccgtgcccatggactactcctgggccagggagcttggtttgatccgcaaacctgcctcgttcatgaccagcatctgcgatgagcgaggacaggagctcatctacgcgggcatgcccatcactgaggtcttcaaggaagagatgggcattggcggggtcctcggcctcctctggttccagaaaaggttgcctaagtactcttgccagttcattgagatgtgtctgatggtgacagctgatcacgggccagccgtctctggagcccacaacaccatcatttgtgcgcgastggngaaagacctggtctccagcctcacctcggggctgctcaccatcggggatcggtttgggggtgccttggatgcagcagccaagatgttcagtaaagcctttgacagtggcattatccccatggagtttgtgaacaagatgaagaaggaagggaagctgatcatgggcattggtcaccgagtgaagtcgataaacaacccagacatgcgagtgcagatcctcaaagattacgtcaggcagcacttccctgccactcctctgctcgattatgcactggaagtagagaagattaccacctcgaagaagccaaatcttatcctgaatgtagatggtctcatcggagtcgcatttgtagacatgcttagaaactgtgggtcctttactcgggaggaagctgatgaatatattgacattggagccctcaatggcatctttgtgctgggaaggagtatggggttcattggacactatcttgatcagaagaggctgaagcaggggctgtatcgtcatccgtgggatgatatttcatatgttcttccggaacacatgagcatgtaacagagccaggaaccctactgcagtaaactgaagacaagaactcttcccccaagaaaaagtgtacagacagctggcagtggagcctgctttatttagcaggggcctggaatgtaaacagccactggggtacaggcaccgaagaccaacatccacaggctaacaccccttcagtccacacaaagaagcttcatattttttttataagcatagaaataaaaaccaagccaawaaaaaaaaaaaaaaaaaaaaaaaaaaaaaaaaaaaaaaaaaa

SEQ ID NO: 591 - DNA, 1193 bp, Homo sapiens
acagtgttagtgctagtgaagtgacctcaactgtgtacaacactgtctctgaaggaactcactttctagagacaatagagactccaagacctggaaaactcttccccaaagatgtaagcagctccactccacccagtgtcacatcaaagagccgggtgagccggctggctggtaggaaaacaaatgaatctgtgagtgagccccgaaaaggctttatgtattccagaaacacaaatgaaaatcctcaggagtgtttcaatgcatcaaagctactgacatctcatggcatgggcatccaggttccgctgaatgcaacagagttcaactatctctgtccagccatcatcaaccaaattgatgctagatcttgtctgattcatacaagtgaaaagaaggctgaaatccctccaaagacctattcattacaaatagcctgggttggtggttttatagccatttccatcatcagtttcctgtctctgctgggggttatcttagtgcctctcatgaatcgggtgtttttcaaatttctcctgarttyccytgtggcactggccgttgggactttgagtggtgatgcttttttacaccttcttccacattctcatgcaagtcaccaccatagtcatagccatgaagaaccagcaatggaaatgaaaagaggaccacttttcagtcatctgtcttctcaaaacatagaagaaagtgcctattttgattccacgtggaagggtctaacagctctaggaggcctgtatttcatgtttcttgttgaacatgtcctcacattgatcaaacaatttaaagataagaagaaaaagaatcagaagaaacctgaaaatgatgatgatgtggagattaagaagcagttgtccaagtatgaatctcaactttcaacaaatgaggagaaagtagatacagatgatcgaactgaaggctatttacgagcagactcacaagagccctcccactttgattctcagcagcctgcagtcttggaagaagaagaggtcatgatagctcatgctcatccacaggaagtctacaatgaatatgtacccagagggtgcaagawtaaatgccattcacatttccacgatacactcggccagtcagacgatctcattcaccaccatcatgactttttcaaaaaaaaaaaaaaaaaaaaaaaaataaaaaaaaaacaaaaaaaa

SEQ ID NO: 592 - DNA, 2002 bp, Homo sapiens
  misc feature (1914): n equals a,t,g, or c
gtatggcatttcattttgttcttgtgttgttggctatgcatcttagagggaaaaaagttacttaagcagacttctcagttttttttcctcttctccaattatcctgtaggaaattcacagtatggccaacagcaagatgcataccagggaccacctccacaacagggatatccaccccagcagcagcagtacccagggcagcaaggttacccaggacagcagcagggctacggtccttcacagggtggtccaggtcctcagtatcctaactacccacagggacaaggtcagcagtatggaggatatagaccaacacagcctggaccaccacagccaccccagcagaggccttatggatatgaccagggacagtatggaaattaccagcagtgaaaaagtacttacattccagtagccagtatctattagcagccatattgtcacctcagcactgtggacacctccctgtgaagagatccttccattccatctagtttttggaaaaaccttgtggataagtggctgtttcatcagtaagcagcctttgtggtttagttataaaaggctttagtagctcaaaaatactcttgatttcacatttctactctagatggcaacattggacagaaaatgcaatgacataaccaatttgtaatgattttggaactgtgtttcaaatggactgttacagactgaaaggtgtgaacagctttgtatgtttatgaagggtaagggaatttaatacttttccacagatttttttgtaaggggaagagggaaatgtacactttttacagcagcaatattttgtatattatgtttatttcatgtggtgaatatgcaaggcggtacactacgcactggacagcatcagaaatcctctgttaatgtggactggagcatggtagatgcttgattgttttggtctcaaaatggtgtgctataaagataaaggtgaggggaagacaaagcacaccatatgtccactgttctgttctcatagaggaaattcaaatcccttttatctattagataatcaagggcactgtgatacagttttgagtaaaaagacattttttaaaagccttccagttttgtggattaaacctttttataaagatcatttataatactgttttaaaatgtgaggcaataagaattactttgtgttggatctgaggaggctttggtaaaacagtttcatctaaatgaaagtggtaatcctcttctaaaatagcaataactgaaaatgaaagtgttaattttaccttgtttgagttatcagggaacttagtaagtaatatcaaagcattttataaatgatatcaaagaagagtcaacattgatccagtcattttattttgtaatattgagggataattggttattaaactgaatagttcaggagactttacaaacctttgtttcaactttcttatctggaaataatatcatttataaagggacacttttatgtttttcccttttttatgttggttgatataacacaaagagatatttaggaaaatgcttattgatgaggtttattctatctgtttttaaagcaccgaggttgcattctagataaccttgtttattagcatggcatattttaatcattatttgagactgtcctgtgcctgattattttagctaaattcagggagattgcgtggggcaggaaagcatgcattgaaaaatttctaaccacggttatttaagcataatctgaaaacatctagcccaaaggtaagttgctattttcatcacagttgcctatgcccagggaataagatgtattctttataattgaattggtttttcccacgtctaactggraacaaaacagaaggggcgtcataaatttgaataagcagaacatactgttctcaacatactgtaatcaaaaggggnaatttcagtgggtctctgtgtgtgtatgagagagagagtgtgtgtttgtgtgtttcaaggtcagaacaggttttttggttttggtttt

SEQ ID NO: 593 - DNA, 1014 bp, Homo sapiens
acctgcagtgatccacccgcctcggcctcccaaagtgctgggtcaactatgttcttgagtaagaactcctgatgcctgattgttatgtttatgaacaaacaaggtgaagggttcagtataagttgggaaatcctagagcaaccatatctgttactttccatcctggttatatttcttaattagactgcgagttctgaatgaagtcctttttaaatagagcagttaatgccatttctgtctctgcaggtttcacaagtagtgtttctaaatgagctctataatctgaaaccggttcatctttcttttgcccacaagattatgtgattgaccaatcaattttttgtggaaaagccctagggattgaatttaaaagatcttcagcaattcttccagttcctttttgcctcctcttggggttttggagtggtctttagtatcctcaggctgttkccattctgctcctgctgtcaattttcaagctyaccagtatcatgtgaataaattggtaaagattagagagtcctgaatcataagctcttatgaggattctcaattttccagtacgtttttgagtattttctcttggattagttaagtctttatgatggctctaagctcagctttagaccatggagtaaaagtggttacagcaggcaggctggttgactagagagtctcactttgtaaggcatttgtccaacttcccctttttcattagcctcaaggagaaaaggtaactgagcaaaagggttactgtactcaaagcatcgaggcaaagaagagacagagaaggagcaatccaggttcatgtgctgcatgagcctttcatttgcgttttgtaaagaatcttttaggcaattttagatttgtataatcctttagatgcctctgcataccgatttaaaatgcatcccgttgtttttgtggcgttttcgatcctttcttttytaatgtgtcccataaataaacagttttatttaaagtttaaaaaaaaaaaaaaaaagaaaaaaagaa

SEQ ID NO: 594 - DNA, 333 bp, Homo sapiens
  misc feature (242): n equals a,t,g, or c
  misc feature (292): n equals a,t,g, or c
  misc feature (328): n equals a,t,g, or c
ggagcgagtgcaaggccgcctgagcgcggcccccacccggyggcggccagggacccccgaggcccccctctgcctttgagcttctcctctgctccaacagacaccttccactctgaggtctcaccttcgcctctgctgaagtctccccgcagccctctccacccagaggtctccctataccgagacccaccatccttccatcctgaggaccgccccaaccctcggagccccccactcagtangtctgaaagggcttcatttggaccgaaacaacccggttaaccttacaagncttctaaggcttccttaaggaacctttcaaccaaanccttc

SEQ ID NO: 595 - DNA, 1120 bp, Homo sapiens
  misc feature (29): n equals a,t,g, or c
  misc feature (40): n equals a,t,g, or c
  misc feature (585): n equals a,t,g, or c
ctgccgccgcgccgccgccgcctcacaanatggcggcccnatagaggagaccgcggccgcctccccggcccattttgtgggaggcgagagatctgtcaacatggaaaacctctgctgaggatgcatccgagtttggaaaccccacttaagggatggagcctgggggatcacattaaacggaaaatgccaacgacttctaccacctctacgcgtttttagtttttcattttctcgaaggaagcgccagaagcctgtggagtaattgtaactagagggagaacggaaagctgaggtgactgctccggggacttggcgcggcgccttggtggctttggttgctcttccacgctcccggcagctgaccagaatctcttggagggtctcctgggccacctcggccgcgccagtcgtgcagtgagacttctgtagttttaaaatgccacagtccacggcccggtcggcaccgctcgcctgaatcgtgggctttgggaaccttggaggctgctgctccaggaactcgcggtcggccgggagccggggagcttcgttgctgggagcgggcggtattcgcggactccggcggcnctggcgggtcgcggccgggatccsagccggggatgacgatgctgatggagctgatggggcaagagtgggaacggagaagtgcagctttctgcasgtgcgcctcaatcgctaagttccactctccatcctctgccgcgctactcctggcatgtggatcaccaagatacaatttctggtcctgtctgttcttattgatgtcctttacagttaataaatttgattgccactaatcagtctgtatctcttgcaaaaacaccacatttagcatccaagtagagtcagagtatgttttttatgagattgtactaaagtaaccttctattacatttcttattaccatattgcatttcctatagtgggcagcatagagcaggtggatcctgacaaagtaatgttagagatgtgctgacagctttacaatagatattctccaactaatttgacaagatataaaataaaatgtagttcgtagttttcaagcattaatggaaagtgttcctattaaaaaattaccaataacagtggaaaaaaaaaa

SEQ ID NO: 596 - DNA, 532 bp, Homo sapiens
cgcatctttttcacttctcttaatgctctgtaaacattaatgtatttatatatgtacttagaattttaaaaaatcaattttattgagttataattaacatacagtaaaaatgctcccatcttgagtaattccatgccttttgacaagtgttctgtacccatgccacgaccaccacaatcgagagagaacatcttcatcactccagaagggctcctttgcagtgagtactccctaggagttccagcggccggtgacattgatctgttttctgtcactgtagatgagatttgtctgttatatacaatttttaaaaattaaatgatatgtatggcttcttttgcttagcataatgtttttgagcttattcatttgttgcatatatcaatactttgcttctttttaccacctgtacttcatttatggatacgttgtttatccatgtgtttatccccaatggacattgggttgtttctgattttttggttattattatgaataaagttgctatgaacattattgtataaaaaaaaaa

SEQ ID NO: 597 - DNA, 1494 bp, Homo sapiens
  misc feature (1483): n equals a,t,g, or c
ggcacgagccgccccgtggcgcccgagtgcactgaagatggcggctgctgtaggacggttgctccgagcgtcggttcctcatgccatgcacctgctgtcacccagcatgcaccctattttaagggtacagccgttgtcaatggagagttcaaagacctaagccttgatgactttaaggggaaatatttggtgcttttcttctatcctttggatttcacctttgtgtgtcctacagaaattgttgcttttagtgacaaagctaacgaatttcacgatgtgaactgtgaagttgtcgcagtctcagtggattcccactttagccatcttgcctggataaatacaccaagaaagaatggtggtttgggccacatgaacatcgcactcttgtcagacttaactaagcagatttcccgagactacggtgtgctgttagaaggttctggtcttgcactaagaggtctcttcataattgaccccaatggagtcatcaagcatttgagcgtcaacgatctcccagtgggccgaagcgtggaagaaaccctccgcttggtgaaggcgttccagtatgtagaaacacatggagaagtctgcccagcgaactggacaccggattctcctacgatcaagccaagtccagctgcttccaaagagtactttcagaaggtaaatcagtagatcacccatgtgtatctgcaccttctcaactgagagaagaaccacagttgaaacctgcttttatcattttcaagatggttatttgtagaaggcaaggaaccaattatgcttgtattcataagtattactctaaatgttttgtttttgtaattctggctaagaccttttaaacatggttagttgctagtacaaggaatcstttattggtaacatcttggtggctggctagctagtttctacagaacataatttgcctctatagaaggctattcttagatcatgtctcaatggaaacactcttctttcttagccttacttgaatcttgcctataataaagtagagcaacacacattgaaagcttctgatcaacggtcctgaaattttcatcttgaatgtctttgtattaaactgaattttcttttaagctaacaaagatcataattttcaatgattagccgtgtaactcctgcaatgaatgtttatgtgattgaagcaaatgtgaatcgtattattttaaaaagtggcagagtgacttaactgatcatgcatgatccctcatccctgaaattgagtttatgtagtcattttacttattttattcattagctaactttgtctatgtatatttctagatattgattagtgtaatcgattataaaggatatttatcaaatccagggattgcattttgaaattataattattttctttgctgaagtattcattgtaaaacatacaaaataaacatattttaaaacatttgcattttaccaccaaaaaaaaaaaaaaaaaaacctcggggggggncccggtcccca

SEQ ID NO: 598 - DNA, 2188 bp, Homo sapiens
gtcggcttccactccttcaggcgtcggcagccactagtcgtggcgagaggggcggggtggccggggctggcgctccacttggcccccgctcccggcccgccccgccgccgsgccccccggatgagggtatatattcggagygagcgcgggacscgatgagtggccgcgcggaaggagctggagacggtcgtagctgcggtcgcgccgagaaaggtttacaggtacatacattacacccctatttctacaaagcttggctattagagcattatgaacattaatgacctcaaactcacgttgtccaaagctgggcaagagcacctactacgtttctggaatgagcttgaagaagcccaacaggtagaactttatgcagagctccaggccatgaactttgaggagctgaacttctttttccaaaaggccattgaaggttttaaccagtcttctcaccaaaagaatgtggatgcacgaatggaacctgtgcctcgagaggtattaggcagtgctacaagggatcaagatcagctccaggcctgggaaagtgaaggacttttccagatttctcagaataaagtagcagttcttcttctagctggtgggcaggggacaagactcggcgttgcatatcctaaggggatgtatgatgttggtttgccatcccgtaagacactttttcagattcaagcagagcgtatcctgaagctacagcaggttgctgaaaaatattatggcaacaaatgcattattccatggtatataatgaccagtggcagaacaatggaatctacaaaggagttcttcaccaagcacaagtactttggtttaaaaaaagagaatgtaatcttttttcagcaaggaatgctccccgccatgagttttgatgggaaaattattttggaagagaagaacaaagtttctatggctccagatgggaatggtggtctttatcgggcacttgcagcccagaatattgtggaggatatggagcaaagaggcatttggagcattcatgtctattgtgttgacaacatattagtaaaagtggcagacccacggttcattggattttgcattcagaaaggagcagactgtggagcaaaggtggtagagaaaacgaaccctacagaaccagttggagtggtttgccgagtggatggagtttaccaggtggtagaatatagtgagatttccctggcaacagctcaaaaacgaagctcagacggacgactgctgttcaatgcggggaacattgccaaccatttcttcactgtaccatttctgagagatgttgtcaatgtttatgaacctcagttgcagcaccatgtggctcaaaagaagattccttatgtggatacccaaggacagttaattaagccagacaaacccaatggaataaagatggaaaaatttgtctttgacatcttccagtttgcaaagaagtttgtggtatatgaagtattgcgagaagatgagttttccccactaaagaatgctgatagtcagaatgggaaagacaaccctactactgcaaggcatgctttgatgtcccttcatcattgctgggtcctcaatgcagggggccatttcatagatgaaaatggctctcgccttccagcaattccccgcagtgctacaaatgggaagtcagagaccatcacagctgatgtcaatcacaacttgaaggatgccaatgatgtaccaatccaatgtgaaatctctcctcttatctcctatgctggagaaggattagaaagttatgtggcagataaagaattccatgcacctctaatcatcgatgagaatggagttcatgagctggtgaaaaatggtatttgaaccagataccaagttttgtttgccacgataggaatagcttttatttttgatagaccaactgtgaacctacaagacgtcttggacaactgaagtttaaatatccacagggttttattttgcttgttgaactcttagagctattgcaaacttcccaagatccagatgactgaatttcagatagcatttttatgattcccaactcattgaaggtcttatttatataattttttccaagccaaggagaccattggccatccaggaaatttcgtacagctgcaagtaaactgatgttgaacatccwgctwtayttcagctggaagcatttgtttttgaagttgtacatagtaat

SEQ ID NO: 599 - DNA, 1273 bp, Homo sapiens
ataatacagttctgagtatgtgttagaaaccaggatgctgcttatttgattctataataactcacctatgacatgccacacatacatgtaactgagctgggttttgagtagttagttggagagttttttaattgagaagtttaattcagaagtttgtttttgttgcctctgatttaacattttatatttcttttgaaaaatttccaacagagctcaaatgatacttttcccacagcaatgcacattgctgctgcaatagaagttcatgaagtactgttaccaggactacagaagttacatgatgctcttgatgcaaaatccaaagagtttgcacagatcatcaagattggacgtactcatactcaggatgctgttccacttactcttgggcaggaatttagtggttatgttcaacaagtaaaatatgcaatgacaagaataaaagctgccatgccaagaatctatgagctcgcagctggaggcactgctgttggtacaggtttaaatactagaattggctttgcagaaaaggttgctgcaaaagtggctgcacttacaggcttgccttttgtcactgctccgaataaatttgaagctctggctgctcatgacgctctggttgagctcagtggagccatgaacactactgcctgcagtctgatgaagatagcaaatgatattcgatttttgggttctggtcctcggtcaggtctgggagaattgatcttgcctgaaaatgaaccaggaagcagtatcatgccaggcaaggtgaaccctactcagtgtgaagcaatgaccatggttgcagcccaagtcatggggaaccatgttgctgtcactgtcggaggcagcaatggacattttgagttgaatgttttcaagccaatgatgattaaaaatgtgttacactcagccaggctgctgggggatgcttcagtttcctttacagaaaactgcgtggtgggaatccaggccaatacagaaaggatcaacaagctgatgaatgagtctctaatgttggtgacagctctcaatcctcatatagggtatgacaaggcagcaaagattgctaagacagcacacaaaaatggatcaaccttaaaggaaactgctatcgaacttggctatctcacagcagagcagtttgacgaatgggtaaaacctaaggacatgctgggtccaaagtgatttacataaatttataatgaaaataaacatgtataaaatttaaaaaaaaaaaaaaaaatcggggggggggccccgtacccattgg

SEQ ID NO: 600 - DNA, 1239 bp, Homo sapiens
aattcggcacgagctgaagccctctctctggatgacacagactttgaggtgtagtgaaatctttgctgttcaccagatgtaatgttttagttccttacaaacagggttgggggggggaagggcgtgcaaaaactaacattgaaattttgaaacagcagcagagtgagtggattttatttttcgttattgttggtggtttaaaaaattccccccatgtaattattgtgaacaccttgctttgtggtcactgtaacatttggggggtgggacagggaggaaaagtaacaatagtccacatgtccctggcatctgttcagagcagtgtgcagaatgtaatgctcttttgtaagaaacgttttatgatttttaaaataaatttagtgaacctatttttggtggtcattttttttttaagacagtcattttaaaatggtggctgaatttcccaacccacccccaaactaaacactaagtttaattttcagctcctctgttggacatataagtgcatctcttgttggacataggcaaaataacttggcaaacttagttctggtgatttcttgatggtttggaagtctattgctgggaagaaattccatcatacatattcatgcttataataagctggggattttttgtttgtttttgcaaatgcttgcccctacttttcaacaattttctatgttagttgtgaagaactaaggtggggagcagtactacaagttgagtaatggtatgagtatataccagaattctgattggcagcaagttttattaatcagaataacacttggttatggaagtgactaatgctgaaaaaattgattatttttattagataatttctcacctatagacttaaactgtcaatttgctctagtgtcttattagttaaactttgtaaaatatatatatacttgtttttccattgtatgcaaattgaaagaaaaagatgtaccatttctctgttgtatgttggattatgtaggaaatgtttgtgtacaattcaaaaaaaaaaaagatgaaaaaagttcctgtggatgttttgtgtagtatcttggcatttgtattgatagttaaaattcacttccaaataaataaaacacccatgatgctagatttgatgtgtgcccratttgaacaagggttgattgacacctgtaaaatttgttgaaacgttcctcttaaaaggaaatatagtaatcttatgtaaaaaaaaaaaaaaaaaactcgaga

SEQ ID NO: 601 - DNA, 1286 bp, Homo sapiens
aattcggcacgagtttgtattttgagtagagacagggtttcaccgtgttggctaggatggtgtctatctcttgaccttgtgatccacccgcctcagcctcccagagtgctgggattacaggtgcgagccactgcgcctggctggttttcatgaatcttgatagacatctataacgttattattttcagtggtgtgcagcatttttgcttcatgagtatgacctaggtatagagatctgataacttgaattcagaatattaagaaaatgaagtaactgattttctaaaaaaaaaaaaaaaaaaaatttctacattataactcacagcattgttccattgcaggttttgcaatgtttgggggtaaagacagtagaaatattattcagtaaacaataatgtgtgaacttttaagatggataatagggcatggactgagtgctgctatcttgaaatgtgcacaggtacacttaccttttttttttttttttttaagtttttcccattcaggaaaacaacattgtgatctgtactacaggaaccaaatgtcatgcgtcatacatgtgggtataaagtacataaaatatatctaactattcataatgtggggtgggtaatactgtctgtgaaataatgtaagaagcttttcacttaaaaaaaatgcattactttcacttaacactagacaccaggtcgaaaattttcaaggttatagtacttatttcaacaattcttagagatgctagctagtgttgaagctaaaaatagctttatttatgctgaattgtgatttttttatgccaaattttttttagttctaatcattgatgatagcttggaaataaataattatgccatggcatttgacagttcattattcctataagaattaaattgagtttagagagaatggtggtgttgagctgattattaacagttactgaaatcaaatatttatttgttacattattccatttgtattttaggtttccttttacattctttttatatgcattctgacattacatattttttaagactatggaaataatttaaagatttaagctctggtggatgattatctgctaagtaagtctgaaaatgtaatattttgataatactgtaatatacctgtcacacaaatgcttttctaatgttttaaccttgagtattgcagttgctgctttgtacagaggttactgcaataaaggaagtggattcattaaactaaaaaaaaaaaaaaaaaaaaaaaaaaaaagtcgaccggccggttatttagtagtagtaggc

SEQ ID NO: 602 - DNA, 404 bp, Homo sapiens
  misc feature (399): n equals a,t,g, or c
tcgacccacgcgtccgcccacgcgtccgcccacgcgtccgggaagcccatacataacagtggaggtgttttgtctaaccatcaaaatgtttgagacttttttttaaacatttctgagttcgaaggtaatactgacagatttcttccctcttccctccccatcacccacctcagtgataacacattactgatagaggaagtcattagaatcatttttaagtttcagatataggagacttcatgcaatttggagataagactaattattgggggttttccttggattttttttttaataactgggggctattttatcagcttgcctattaaaggactatggtaagtatagaatcttaatggttgccagttagtaattcttttttttttttttttactgtanacaca

SEQ ID NO: 603 - DNA, 1168 bp, Homo sapiens
  misc feature (1121): n equals a,t,g, or c
  misc feature (1122): n equals a,t,g, or c
  misc feature (1133): n equals a,t,g, or c
  misc feature (1153): n equals a,t,g, or c
ggcgccggcgtcggctgcgtctccggcgtttgaattgcgcttccgccatctttccagcctcagtcggacgggcgcggagacgcttctggaaggaacgccgcgatggctgcgcagggagagccccaggtccagttcaaacttgtattggttggtgatggtggtactggaaaaacgaccttcgtgaaacgtcatttgactggtgaatttgagaagaagtatgtagccaccttgggtgttgaggttcatcccctagtgttccacaccaacagaggacctattaagttcaatgtatgggacacagccggccaggagaaattcggtggactgagagatggctattatatccaagcccagtgtgccatcataatgtttgatgtaacatcgagagttacttacaagaatgtgcctaactggcatagagatctggtacgagtgtgtgaaaacatccccattgtgttgtgtggcaacaaagtggatattaaggacaggaaagtgaaggcgaaatccattgtcttccaccgaaagaagaatcttcagtactacgacatttctgccaaaagtaactacaactttgaaaagcccttcctctggcttgctaggaagctcattggagaccctaacttggaatttgttgccatgcctgctctcgccccaccagaagttgtcatggacccagctttggcagcacagtatgagcacgacttagaggttgctcagacaactgctctcccggatgaggatgatgacctgtgagaatgaagctggagcccagcgtcagaagtctagttttataggcagctgtcctgtgatgtcagcggtgcagcgtgtgtgccacctcattattatctagctaagcggaacatgtgcttcatctgtgggatgctgaaggagatgagtgggcttcggagtgaatgtggcagtttaaaaaataacttcattgtttggacctgcatatttagctgttttggaacgcagttgattccttgagtttcatatataagactgctgcagtcacatcacaatattcagtggtgaaatcttgtttgttactgtcattcccattccttttcgtttagaatcagaataaagttgtatttcaaatatctaaaaaaaaaaaaamnngggggggscgnccattccccaaaggggggtnaaaacccggggggtt

SEQ ID NO: 604 - DNA, 458 bp, Homo sapiens
ggcggccgtggcgcgggtggcggctgctgtgctggctgtggggacggaggcggtgaagtgccatcttcggctaggtcgtcacaggctccggctcatggcatcaagtggcatccatcataagatcgttaactgaagacaatatgcaaaattctcacatggatgaatacagaaattctagtaatggcagcacaggcaacagttcagaggtagtggtagaacatcctactgatttcagtactgagattatgaacgttacagaaatggaacagtcacctgatgactctcccaatgtgaatgcatctacagaagaaactgaaatggcaagtgctgtggaccttccagtgacgctgacagaaacagaagcaatttccctccagaatatgaaaaattttggaaaactgtagaaaataatcctcaggttttaaaggctgggtatatttgcctcaatatgtagaaca

SEQ ID NO: 605 - DNA, 911 bp, Homo sapiens
  misc feature (897): n equals a,t,g, or c
  misc feature (904): n equals a,t,g, or c
cgacccacgcgtccggacccacgcgtccggggaaaatggcgctggccatgctggtcttggtggtttcgccgtggtctgcggcccggggagtgcttcgaaactactgggagcgactgctacggaagcttccgcagagccggccgggctttcccagtcctccgtggggaccagcattagcagtacagggcccagccatgtttacagagccagcaaatgataccagtggaagtaaagagaattccagccttttggacagtatcttttggatggcagctcccaaaaatagacgcaccattgaagttaaccggtgtaggagaagaaatccgcagaagcttattaaagttaagaacaacatagacgtttgtcctgaatgtggtcacctgaaacagaaacatgtcctttgtgcctactgctatgaaaaggtgtgcaaggagactgcagaaatcagacgacagatagggaagcaagaagggggcccttttaaggctcccaccatagagactgtggtgctgtacacaggagagacaccgtctgaacaagatcagggcaagaggatcattgaacgagacagaaagcgaccatcctggttcacccagaattgacaccaaagatgttaaaaggataacttcacagtaaatcatttctcctgaaatagaggaagattctttacgttgttgtgcttgtttttaaatcatcagtatagtttaacacattctttctaagcagttttgtgtgggataatttgaagaatatattatgagtaaactccgaaaattttgtttatccaaaggctcaatggattatgtttctattatatacaaggttttaagtaaacataaaatttccagaacaaaaataaaaaatttaaaattcatagcaaaaaaaaaaaaaaggggnggccgcnctagggg

SEQ ID NO: 606 - DNA, 738 bp, Homo sapiens
  misc feature (730): n equals a,t,g, or c
  misc feature (737): n equals a,t,g, or c
cccacgcgtccgcccacgcgtccgcgcagatggcggcggcgcacggcgcctgagcgggccggggccatgagcgccgcccggccccagttcagcattgatgatgccttcgagctgtccctggaggacgggggccctgggcccgagtccagcggggtcgcgcgctttgggccgctgcacttcgagcgtcgggcccggttcgaggtggctgacgaggacaagcagtcccggctgcgctaccagaacctggagaacgatgaggatggagcccaggcctctccggagccggatgggggagtcggcaccaggttagggccagggattccagccgaacttccaccggggcttccagttcttctacctgccctacttcgagaagtgatcgcggcgcagcgtggaccccttgcgcccatgggggcgcccctcttgccctgttccgttcccctcatctcaagggaagaggccctccaggaccctcgaaaccccagcccctagggagtttgctcaggaagttcggggcatgcaggcctggccctgggaaagccgcccgtcgcctgctctgtgccttaacttattctcgggccgtgcggctgctaggttgctgttattttgtgctaataaaagagtaattaattccaaaaaaaaaaaaaaaaaaaaaaaaaaaaaaaaaaaaaaaaaaaaaaaaaaaaaaaaaaaaaaaaaaaaaagggcggccgttttaaaggatccaagnttacgtnc

SEQ ID NO: 607 - DNA, 1348 bp, Homo sapiens
  misc feature (1328): n equals a,t,g, or c
tcgacccacgcgtccgcccacgcgtccggcccggtgccaagcgcagctagctcagcaggcggcagcggcggcctgagcttcagggcagccagctccctcccggtctcgccttccctcgcggtcagcatgaaagccttcagtcccgtgaggtccgttaggaaaaacagcctgtcggaccacagcctgggcatctcccggagcaaaacccctgtggacgacccgatgagcctgctatacaacatgaacgactgctactccaagctcaaggagctggtgcccagcatcccccagaacaagaaggtgagcaagatggaaatcctgcagcacgtcatcgactacatcttggacctgcagatcgccctggactcgcatcccactattgtcagcctgcatcaccagagacccgggcagaaccaggcgtccaggacgccgctgaccaccctcaacacggatatcagcatcctgtccttgcaggcttctgaattcccttctgagttaatgtcaaatgacagcaaagcactgtgtggctgaataagcggtgttcatgatttcttttattctttgcacaacaacaacaacaacaaattcacggaatcttttaagtgctgaacttatttttcaaccatttcacaaggaggacaagttgaatggacctttttaaaaagaaaaaaaaaatggaaggaaaactaagaatgatcatcttcccagggtgttctcttacttggactgtgatattcgttatttatgaaaaagacttttaaatgccctttctgcagttggaaggttttctttatatactattcccaccatggggagcgaaaacgttaaaatcacaaggaattgcccaatctaagcagactttgccttttttcaaaggtggagcgtgaataccagaaggatccagtattcagtcacttaaatgaagtcttttggtcagaaattacctttttgacacaagcctactgaatgctgtgtatatatttatatataaatatatctatttgagtgaaaccttgtgaactctttaattagagttttcttgtatagtggcagagatgtctatttctgcattcaaaagtgtaatgatgtacttattcatgctaaactttttataaaagtttagttgtaaacttaacccttttatacaaaataaatcaagtgtgtttattgaatggtgattgcctgctttatttcagaggaccagtgctttgatttttattatgctatgttataactgaacccaaataaatacaagttcaaatttatgtagactgtataagattataataaaacatgtctgaagtcaaaaaaaaaaaaaaaaaaaattnctcggccgacaagggaattc

SEQ ID NO: 608 - DNA, 722 bp, Homo sapiens
  misc feature (690): n equals a,t,g, or c
  misc feature (703): n equals a,t,g, or c
  misc feature (718): n equals a,t,g, or c
ggcttaaatgtgattcttgatactgttttaagtatttaggttgcaattaactttggcaaagtcagtcgacataagccctgtggatatggccttatgtacactgtaatgcagacaggtgcttttcatcattcatgtaacattctcacacagttgaggrtattcatctcctcaccaattccagattgtraatgtacywtcttaaacaactcttgaggtcaccaaacagtagttatttgactgttaataggtgctacttgcttgcaaggatttggagatgtaaacatgaagaaaatatagttactgcctgcaaagaattaacatccgtctagtgggagaaacaaacacaccccactcactaagtatggaaaactgattctgggaggaagcagaaatgtccctagataacagcatgtattgcagatacccaaatgtttattgttttctcagcccttcaattttgcttttctctctcaaatgctacagactcaatttaaatcttacctttgattgttgaaaaaagtcactaagatgtgaatacagaatagacattgagaggttatatatgtccaaaactcatctgtccagcagtcaccgtcctcttcagagtggtcacgttgggcagrtgggcacaggtgctggtgatgcccctcckgggcaaaacgccccatttgtggcacttccagatactanttatttacttttnaagagagagacaggntcac

SEQ ID NO: 609 - DNA, 330 bp, Homo sapiens
  misc feature (315): n equals a,t,g, or c
  misc feature (321): n equals a,t,g, or c
  misc feature (330): n equals a,t,g, or c
ggcagagtattttactgactaaatattactatataaacattttcatatcttgccacttcacctaacaatacagcacaagcagcttctcatggcattaagaattgtttgtacatgtaattttgaatggctgtatgctgtttcatcttaagaatataccataattctaatttttcatcattataatagcactgtgacgaacatccttcttaacaaaattctttgtctgcacctatggttattttctaaggtagrttattagaatttgaaatgccttgcacaagggacagtaactttttcacccttagttttcagggnggaccngttgtctcn

SEQ ID NO: 610 - DNA, 1866 bp, Homo sapiens
ggcctcccaaagtgttgagattacaggtgtgagccaccatgctcgctgagagcagatatttgaaatgtcactttgagttctgagaaaaagtaaaaagccagaagacatactagatatataaatatattactgcttaaaaagatttcctawaaagaaatgtatcmagtgtatgaatcaaagtctgaaagaaagatgaagagccaccagacttctaggtaggtttacatccatcatgttcctcttgactgcctttgtttgtcgtttagttttttgctccactcaagcctgttagaatcaccatggaatacagctccagtgggaaggccactggagaagctgatgtgcactttgagacccatgaggatgctgttgcagcgatgctcaaggatcggtcccacgttcatcataggtatattgaactgttcctgaattcatgtccaaaaggaaaataagactctaggggctccagataataagggtgaagcaagaagcatttcatttgcacatctttcttggacttgggatatacagttccagtttattagcagcaactgctagggaaatgattttggtgttttgggttaattgcttctaagaaaagtttcatagtggactgtttagaagaagaaatgaaagatccagtttgggattatgaaataaaccacaaattaaaatttttgtttaaactgtccaggatctgatttaaaaatatggtctttgttttatatgattaaatggtttgttttcatagatgatatgttactcattgtaaagaccacatatttttattcagcagtgttctttaaacgctttcatttaaaaagtaactttttttttttgcctgtgaattgagtgctctgatgtaaaacttctcatggagtgaaacagtgatttattttaaccaaacattcaccaaagcaaagaacggtttcagacctttgaactggtatggtttggcagaatagttttaaattttgctgtatttgattacttagagataggaatttttaaaaatcaaaacaaaaaataccacagcttagtgtaaatgacaatttggcggttttatgtctttagaaatgttttgcctttctaagccttgtgctaaaggcgtataacggtggtgcctatctacttaagggggcattctagtcttaacttaaaagttgtctaaactgtccctccctggctttttttggtttggggtagacctaagggtgtttgttagtctcaaaactgtgaagtgacatgtcagaacagtccagactggtaagaaaattaatggcttcacttgaatttaaaccagctctagataggaaaaaaatcagtctcctcatttgctttttaaatggagtagtacatcccatattttagaacaagtaggggtgccttgcttaaataaaaatagcatttaatgtataattgtgtgaagggtttatggataaagctgtacttctgtcacaatgtggcagtactttctgctttaatattaaacagcttgttatttaaatattggacaaaatggctggcttcaaaatatagtcattaataaactaactttatgtgcacctgtgtaggagaatcaaaatcctgtatgctttctttgccttgttcctgttctcagggtgacgactgccaccaggagatgcagttctagttcttaaaattaaatttgcccaggtttctgacaggtgatacctggaagagagactatgtcttctcttacttaatacataaccatctttgattaccagctaagatgcgaaatcactgtactgtagtcaataaatgaagacttgtttcaggaaaaaaaaaaaaaaaaaaaaaaaaaaaaagttttgccctatagtgatcgtttacaagtcgacg

SEQ ID NO: 611 - DNA, 2176 bp, Homo sapiens
  misc feature (2162): n equals a,t,g, or c
  misc feature (2168): n equals a,t,g, or c
  misc feature (2169): n equals a,t,g, or c
gcccacgcgtccgatcaactctaaatccaaaatcttatctgagtctcaccaactcaaaagtctcaaatctcacattgaagccatctaaattaagtttgggagaggatctgtgtgtgatttctgggacataattccaactgtgcacttgtgaacctagaaaacaagttatctgttcccaagtatgatggcatgacaggcagacaataatagttacacacgttcctgttcaaaaagcagaaacagatggaaaaaggagccatcagcaccaatcaatttacaaaaccagcgaggcacccttctttaagtttcaaggcctgggagtaatcttcagctcactgctgttctctgggcttgttgactgtctcagagtcatctttactttttcacaaaaggtagcacacgtttgcagctgagtatcaacttatcagtttgttcttcttttatattctctaaagctttctgttaaaaatggtggtgcttctgctgctataacgttgtcaagaaacttgtgggtcttttacatatgtcacagggatgcactcatttagataggaggctcctcacgtatctttcctggaaaatcctgtctctgtttttggctttttctgaaatagctgagaggatctatgattcacacccttaatatcttcaaagagtcttgtgtgtgacctgataytcagaccttttgatgtttctgaagtattagcaaaaggttatacagccatatcttcatcactttctctagagtaaaggctgtcctgacggtgaatcttagttttagtggcttttgccatttgaataggccgcgaatttcccaaatcatcaagtcctggtttctttatatttaacaggtcttccctcaatctacctctttccacattttactataatcagcaagaagacagcaggctgtaccttccacagcttgcttggaaatatcctcagctaaatattgaagtcatcacttaaaagttctgctttacacataacggcaggacacaactcagcttagcttttcgccactatgtaacaaggactcctttcctccacttctccagtaacatattcctcattttttaccaacagtctattcatgatgatttagatattctatggcaatcgaggtattctctattatgctcctttcttcaaggccgccctagcattaacattccatatttctactaacagtctgtttaaggcagtttagcttcttttctggcatgctcctcagaattcttccagcctccacctactgcccaattccagagccacttttctacttttaggtatttgttacagcagcacctcaagtacctagaaaactcttttatgcctgcttctctgccagatgacttgaatatggtactagatttggaattcacctttctccagggtcactgtttatttcaaagaggtgaatttacctgtgctagggttttcacactgggagtgctaccagaactaccacaggatgaaagtggtgagcccaccactgcagagaagttttctcagtgccgtaatatagaggaattctcaaaataagccctactccttttcacttactgaaaacaacttggataatgtgtaacagccagccccatttcaaaaagattaccaggggtaaaacaactttttcatgggtcaaaatcatcttccgaagaaaatgatttcttaaaagaattgaacattgtaaatcaaagggcattgtcctgttttggattaacaaaacaggaaaaataaccaatccttgtaaaattatttgaaattttcttgtttttatcagttgagtgcctatagatgcacatacaaaaacaactgccatttttgtatataatagtcttccaagatagagatttacattaggagagaattaaacatccaggagggatgaacagtatttcatgtgtgctatgtagtgttttgcttcattgagagtcattttcatgaattatttttactactgcagtcatcttaaatttataatcatctcaaaaaagatgtcacaatgaacagacaaccatctgtgaggtcagtcattttgcatgatgtatgtaatcaaaaagtttgaaatgtctgcttactaataaagaatgttttcactgaaacttaaaaaaaaaaaaaaaaaaaaaaaaccccgggggggggcccggtaccaaatncccccnnaaggggg

SEQ ID NO: 612 - DNA, 3619 bp, Homo sapiens
  misc feature (12): n equals a,t,g, or c
  misc feature (22): n equals a,t,g, or c
ggtggcttccgngcccggactnccatttccagcggttgctggttctgacgggttgtagtctgccaggacaatgagttatgactaccatcagaactggggccgtgatgggggtccccgcagctccggtgggggctatggaggggggccagcagggggtcatggaggtaaccgaggctccggaggaggcggcggcggcggagggggtggtcgaggcggcaggggccggcatcccgggcacctgaaagccgcgaaatcggcatgtggtacgcgaaaaaacaggggcagaagaacaaggaagcggagaggcaagagagagctgtagtacacatggatgaacgacgagaagaacaaattgtacagttactgaattctgttcaagcgargaatgataaagagtcagaagcacagatatcctggtttgctcctgaggatcatggatacggtactgaagtttctactaagaacacaccatgctcagagaacaaacttgacatccaggaaaagaagttgataaatcaagaaaaaaaaatgtttagaatcaggaacagatcatatattgacccgagattctgagtatctcttgcaagaaaatgaaccagatggaactttagaccaaaaattattggaagatttacaaaagaaaaaaaatgaccttcggtatattgaaatgcagcatttcagagaaaagctgccttcgtatggaatgcaaaaggaattggtaaatttaattgataaccatcaggtaacagtaataagtggtgaactggttgtggcaaaaccactcaagttactcagttcattttggataactacattgaaagaggaaaaggatctgcttgcagaatagtttgtactcagccaagaagaattagtgccatttcagttgcggaaagagtagctgcagaaagggcagaatcttgtggcagtggtaatagtactggatatcaaattcgtctccagagtcggttgccaaggaaacagggttctatcttatactgtacaacaggaatcatccttcagtggctccagtcagacccgtatttgtccagtgttagtcatatcgtacttgatgaaatccatgaaagaaatctgcagtcagatgttttaatgactgttgttaaagaccttctcaattttcgatctgacttgaaagtaatattgatgagtgcaacattgaatgcagaaaagttttcagaatattttggtaactgtccaatgatacatatacctggttttacctttccggttgtggaatatcttttggaagatgtaattgaaaaaataaggtatgttccagaacaaaaagaacacagatsccagtttaagaggggtttcatgcaagggcatgtaaatagacaaraaaaagaagaaaaagaagcaatatataaagaacgttggccagattatgtaagggaactgcgaagaaggtattctgcaagtactgtagatgttatagaaatgatggaggatgataaagttgatctgaatttgattgttgccctcatccgatacattgttttggaagaagaggatggtgcgatactggtctttctgccaggctgggacaatatcagcactttacatgatctcttgatgtcacaagtaatgtttaaatcagataaatttttaattatacctttacattcactgatgcctacagttaaccagacacaggtgtttaaaagaacccctcctggtgttcggaaaatagtaattgctaccaacattgcggagactagcattaccatagatgatgtcgtttatgtgatagatggaggaaaaataaaagagacgcattttgatactcagaacaatatcagtacaatgtccgctgagtgggttagtaaagctaatgccaaacagagaaaaggtcgagctggaagagttcaacctggtcattgctatcatctgtataatggtcttagagcaagtcttctagatgactatcaactgccagaaattttgagaactcctttggaagaactttgtttacaaataaaggwttttaaggctaggtggrattgcttatttctgagtagattaatggrcccaccatcaaatgaggcagtgttactctccataaggcamctgatggagcttgaacgctttggataaacaagaagaattgacacctcttggagtccacttggcacgattacccgttgagccacatattggaaaaatgattctttttggagcactgttctgctgcttagacccagtactcactattgctgctagtctcagtttcaaagatccatttgtcattccactgggaaaagaaaagattgcagatgcaagaagaaaggaattggcaaaggatactagaagtgatcacttaacagttgtgaatgcgtttgagggctgggaagaggctaggcgacgtggtttcagatacgaaaaggactattgctgggaatattttctgtcttcaaacacactgcagatgctgcataacatgaaaggacagtttgctgagcatcttcttggagctggatttgtaagcagtagaaatcctaaagatccagaatctaatataaattcagataatgagaagataattaaagctgtcatctgtgctggtttatatcccaaagttgctaaaattcgactaaatttgggtaaaaaaagaaaaatggtaaaagtttacacaaaaaccgatggcctggttgctgttcatcctaaatctgttaatgtggagcaaacagactttcactacaactggcttatctatcacctaaagatgagaacaagcagtatatacttgtatgactgcacagaggtttccccatactgtctcttgttttttggaggtgacatttccatccagaaggataacgatcaggaaactattgctgtagatgagtggattgtatttcagtctccagcaagaattgcccatcttgttaaggaattaagaaaggaactagatattcttctgcaagagaagattgaaagtcctcatcctgtagactggaatgacactaaatccagagactgtgcagtactgtcagctattatagacttgatcaaaacacaggaaaaggcaactcccaggaactttccgccacgattccaggatggatattacagctgacagcttttcaggggtggtctgaaaagccagtttgacagccattcttcatcattgtttaaattttggctggatgccaaaccctgggacatgaacaattttcatgtgtaaggtagaagccttcagtaggtagtaaagacttaatgtgcatgacttgatgttatatgtagagatatatatatatatatatataccataaaagcaatatgttctctgatcatatactctgctgtggtcatgcccactctttgggagtatattccctttatatatattgagtattgtaccacttgagaaattcctttgttctgttatacaaaattaatctttctgctcataatgattgatgataccaccagtaaaaataggatgtttaccccaaaacaagtgtcaattaagaatttgaacacaaccacattttttaaaatgaaacttctatcggaagtaaattaatttgttgtaataaagtccagtatttaataaaatgtacaatgttaaatctcaaaaaaaaaaaaaaaaaaaaat

SEQ ID NO: 613 - DNA, 1427 bp, Homo sapiens
  misc feature (297): n equals a,t,g, or c
ggaattgttagctgtggtcggccccgtgggagcagggaagtcatcactgttaagtgccgtgctcggggaattggccccaagtcacgggctggtcagcgtgcatggaagaattgcctatgtgtctcagcagccctgggtgttctcgggaactctgaggagtaatattttatttggraagaaatmcgaaaaggamcgatatgaaaaagtcataaaggcttgtgctctgaaaaaggatttacagctgttggaggatggtgatctgactgtgataggagatcggggaaccacgctgagtgnaggscagaaagcacgggtaaaccttgcaagagcagtgtatcaagatgctgacatctatctcctggacgatcctctcagtgcagtagatgcggaagttagcagacacttgttcgaactgtgtatttgtcaaattttgcatgagaagatcacaattttagtgactcatcagttgcagtacctcaaagctgcaagtcagattctgatattgaaagatggtaaaatggtgcagaaggggacttacactgagttcctaaaatctggtatagattttggctcccttttaaagaaggataatgaggaaagtgaacaacctccagttccaggaactcccacactaaggaatcgtaccttctcagagtcttcggtttggtctcaacaatcttctagaccctccttgaaagatggtgctctggagagccaagatacagagaatgtcccagttacactatcagaggagaaccgttctgaaggaaaagttggttttcaggcctataagaattacttcagagctggtgctcactggattgtcttcattttccttattctcctaaacactgcagctcaggttgcctatgtgcttcaagattggtggctttcatactgggcaaacaaacaaagtatgctaaatgtcactgtaaatggaggaggaaatgtaaccgagaagctagatcttaactggtacttaggaatttattcaggtttaactgtagctaccgttctttttggcatagcaagatctctattggtattctacgtccttgttaactcttcacaaactttgcacaacaaaatgtttgagtcaattctgaaagctccggtattattctttgatagaaatccaataggaagaattttaaatcgtttctccaaagacattggacacttggatgatttgctgccgctgacgtttttagatttcatccaggtaacgttgagagtaatgtcaggatctcaaatggaaaacggaagttcctattttttcaagcccttttcatggggtctgggggtgggactctcggcctggctgtgtgtaatgttaacttaataaagggccatgtttgtaaaagaaaaaaaaaaaaaaaaaaaaaaaaaaaaaaaaaaaaaaaaaaaaaaaaaaaaagcgagcggcc

SEQ ID NO: 614 - DNA, 1433 bp, Homo sapiens
cggaagtgcgagctggcgcactgcagtctgggagtctttggagtaagaatggccttggaagggatgagcaaacggaagagaaagagaagtgtccaggagggagagaatcctgacgacggcgttcgcgggagtccgccggaagactacaggcttggacaggtcgccagtagcttatttcgcggcgaacaccattccagaggtggcaccggtcggctggcgtccctcttcagttctctggagccccagattcaacccgtgtacgtgcctgtgcctaaacaaaccatcaaaaaaacgaaacggaatgaggaggaagaaagtacatcccagattgaaagaccactttcgcaagaacctgccaaaaaagtgaaagcgaagaagaaacacactaacgcagaaaaaaagttggcagacagggaaagcgctctagcgagtgctgatttagaagaagaaattcaccagaaacaagggcagaaaaggaaaaattctcaacctggtgttaaagtagcagatagaaaaatacttgatgacacagaagacacagttgtcagtcaaagaaagaaaattcaaatcaaccaagaagaagagagattaaagaatgagagaactgtgtttgttgggaatttgcctgttacatgtaataagaagaagctgaagtcgttttttaaagagtatggacaaatagaatctgtacgatttcgttctctgattccagcagagggaacgctatccaaaaagttggcagcaataaaacgtaaaattcatcctgatcagaaaaatattaatgcctatgttgtgtttaaggaggagagtgctgccacgcaagcattgaaaagaaatggggcccagattgcagatggatttcgtattagagttgatctcgcatctgagacctcatctagagacaagagatcggtttttgtggggaatctcccttataaagttgaagaatctgccattgagaagcactttctggactgtggaagtatcatggccgtgaggattgtgagagacaaaatgacaggcatcggcaaagggtttggctatgtgctctttgagaatacagattctgttcatcttgctctgaaattaaataattctgaactcatggggagaaaactcagagtcatgcgttctgttaataaagaaaaatttaaacaacaaaattcaaatccacgattgaagaatgtcagtaaacctaagcagggacttaattttacttccaaaactgcagaaggacatcctaaaagcttatttattggagaaaaagctgttctccttaaaacgaagaagaaaggacagaagaaaagtggacgccctaagaaacagagaaaacagaaataacaaccaggaactgctttttcttttcctgctgagtactgctaataaaagtgctattatctgctgatagcatcgtctgctaaaaaaaaaaaaaa

SEQ ID NO: 615 - DNA, 506 bp, Homo sapiens
  misc feature (10): n equals a,t,g, or c
aagctacacntgtccagcatcagagaatccatactggagaaaggccttatgaatgcascgaatgtggaaaaaccttcagtcgaaaagacaaccttactcagcacaagagaatccacactggagaaatgccttataagtgcaatgaatgtgggaratattttagccatcactccaatctaattgtacaccagagagttcacaatggagcaaggccttataagtgcagtgattgtgggaaagtcttcagacacaaatctacacttgttcagcatgagagtattcacactggagaaaatccttatgttgcagtgttgtgggaaatcctttggccacaaatacaccctcattaaacatcagcgaattcacactgagtcaaagccgtttgagtgcatgaatgcgggaaatctttagtcgaagtctgatatattgcacacagagggtcacactggtgaaaggcctttgtgtgcgtaatgtggaagcttwtcgactccacctgttggaccaag

SEQ ID NO: 616 - DNA, 2174 bp, Homo sapiens
atttgtactttgtgaagggagatgaaaggacgtttgaagtatatatattttgtcaagaggaaagaagataaaactatgccagttttatatcaatagcttgtagaagctcagctcttcttggtcttggctagactgcctagattcccacrgcagacaaggttgagaatccattgctggaatcttggtattgatgagttacagtgatggaacatgtgcttggccacaggcaggtccagtcactgcaaaagtgaccaagccagcaggtcacccttaacttcagaaacaattattggtggtgaactgtacttaaattgcagagaaacctgtaagtaatggaaggtaaagaaaaattacagaatggaaaataatattttgggcaagcaaacaaattcactgagaattccaaaagtatattaaaaaagaagatagctatgagttcagatctatcttattggtctttaatattacaaccaatccttaactttccactataaaggaaggattactagattgattactttctggatagataatctggtaataaatgataggtaaatcaaaaattacttttatttaggagtttgaattcttactctcatcagacattttttttctagggacgcttactaattaaatgatttaagttgtttcttaggggttttttgcctatatatttatgactgtgttaatgagtagtgaaatgatgcggaaagacagctatcaggaagaggaaatacagaagcctgaataatctatgggttagaaaagcatccctgaataatcaaaaattggcagtattggcattgttctcaagcctttttatgaaaatgaaatctgaaatcaccaaatgtaaacctgggaacattattctagtgttgctgtcttggattcatgttaagaagcgtcttcattctttgctcatgttgcccacttcttgtggatttgtctgagtgttttttgacaatcacttccttaaagactcttctgaactagttggacctggttaatcatagagagtagcctttaatcatggatagtcttcttggattatttttatatttgaaaagaaaatgttttatttgcactactgagtaggaagagttaattgttttctttgktctttttttgaagtcattacacaggacttcactccagagttaccattatgagtgtgttcagctctggtccacagaggatggataaaaatggtttgttatgtttttttgctctgcagtgctatgagccttatatctgttaatatgaaggacaaagtcaaaagcagcagtggatagcaggaagggtagagactaatatgtttgggaccaaaaccatctaagttagagatttccagatcacagaggggctgggcattctctggagcagtcattggttggtgctttattgtaatcattttgcgccaatccccaacaattaggaactggaccctgggaataagctgagggtgctgaactgttggggaagggtgactgtagccacatggaagataaaatatgggtttttctgcaaaatttccatctgagggtttttacatttaatatttttttaagacagtttaaagagcaaacgttttttaagtgtattctagttgcaaagtatgcacacatatcttgaatggctttatttttattgtgtaaaactgttgaacacatgactgtgatgcacaaattctttacgtgtaaggagtctatgcattttacagtaacttattttatgatcgggtgatgagacagttatactttcaactgccattatttttattaagtgctttcattttctttacagttattataaaattgtatttattttatacagatgggttttcattttcctgatgctgtaatgtttacttcagcttgttgacctttctttgtgttatctgcatgttgtaacgtgtgataagaatgaatgtaaaggctgtggcaactgtaattaatttttgtaaagggctggtcacacgtggatctggtttatgaatgcatttgggatgattttggtaaccagatcaccttttcagaaatttagatgtgaacaccaaaagaagcattttctcaacaaaaattaatagctggttctattttttttaaacctagaaaaaataaagttgatttttttcaattaaaaaaaaaaaaaaaaaaaaaaaaaaaaaaaaaaaa

SEQ ID NO: 617 - DNA, 3147 bp, Homo sapiens
tttagagagatggtgtcttccagcaatctgccacaagggtggttagaggtccaggggataccggaagggtgggatggtgtagcaggatggtatcttccaggaataaaccctggcaggactgctaggcggtttgcttatctttttgtgaatatcaatgtgacctctgagcctcacgaagttcttgccctgtggttcttgtggtatgtgaagcagtgcgggggcaccactcggatattctctgtcaccaatggtggccaggaacggaagtttgtaggtggatctggtcaagtgagcgaacggataatggacctcctcggagaccaagtgaagctgaaccatcctgtcactcacgttgaccagtcaagtgacaacatcatcatagagacgctgaaccatgaacattatgagtgcaaatacgtaattaatgcgatccctccgaccttgactgccaagattcacttcagaccagagcttccagcagagagaaaccagttaattcagcgtcttccaatgggagctgtcattaagtgcatgatgtattacaaggaggccttctggaagaagaaggattactgtggctgcatgatcattgaagatgaagatgctccaatttcaataaccttggatgacaccaagccagatgggtcactgcctgccatcatgggcttcattcttgcccggaaagctgatcgacttgctaagctacataaggaaataaggaagaagaaaatctgtgagctctatgccaaagtgctgggatcccaagaagctttacatccagtgcattatgaagagaagaactggtgtgaggagcagtactctgggggctgctacacggcctacttccctcctgggatcatgactcaatatggaagggtgattcgtcaacccgtgggcaggattttctttgcgggcacagagactgccacaaagtggagcggctacatggaaggggcagttgaggctggagaacgagcagctagggaggtcttaaatggtctcgggaaggtgaccgagaaagacatctgggtacaagaacctgaatcaaaggacgttccagcggtagaaatcacccacaccttctgggaaaggaacctgccctctgtttctggcctgctgaagatcattggattttccacatcagtaactgccctggggtttgtgctgtacaaatacaagctcctgccacggtcttgaagttctgttcttatgctctctgctcactggttttcaataccaccaagaggaaaatattgacaagtttaaaggctgtgtcattgggccatgtttaagtgtactggatttaactacctttggcttaattccaatcattgttaaagtaaaaacaattcaaagaatcacctaattaatttcagtaagatcaagctccatcttatttgtcagtgtagatcaactcatgttaattgatagaataaagccttgtgatcactttctgaaattcacaaagttaaacgtgatgtgctcatcagaaacaatttctgtgtcctgtttttattcccttcaatgcaaaatacatgatgatttcagaaacaaagcatttgactttctgtctgtggaggtggagtaggtgaaggcccagcctgtaactgtcctttttcttcccttaggcaatggtgaactgtcattacagagcctagaggctcacagcctcctggaggaagcagcctccactttggatcaggaaatagtaaaggaaagcagtgttgggggtagcggcatgcagaccctcagaccagaatggggacatcttgtggtctgctgcctcaggaatctcctgaccacttgtagtccctccgacttctctagacatctagtctcagtgctagcttatttgtatttttcctctttcacttcttatggaggagagtgtttaactgagttagaatgttgaaactgacttgctgtgacttatgtgcagctttccagttgagcagaggaaaatagtggcaggactgtcccccaggaggactccctgcttagctctgtgggagaccaactacgactggcatcttctcttccccctggaaggcagctagacaccaatggatccttgtcagttgtaacattctatttcaacttcaggaaagcagcagttttcttttaatttttcctatgaccataaaattagacatacctctcaacttacatatgtcttcaacatggttacctctgcataaatattagcaaagcatgccaatttctcttaagtactgaaatacatatgataaatttgactgttatttgttgagactatcagacagaaaagaaattagggctctaatttccttaaagcaagctcacttgctttagttgttaagttttataaaagacatgaaattgagtcattttatatatgaaaactaagttctctatcttaggagtaatgtcggcccacaagggtgcccacctcttgttttccccttttaaaaactcagatttttaaaagccctttccaaaggtttcaactgtaaaatacttctttttacaatgtatcaacatatttttatttaaggggaattaacaattgccagggaaaccagccaacccaagtttattatatcattaaccttatcataaattcaaacctaagttgctggaccctggtgtgaggacataaatcttccaaagttttgcctatcctaagagctgcatttttctactgctctttaccttgcattttagctaatttaggagttttgagaatgtattggatacgctccagtacataaggagttgccgcatattatatcagactgctttgagaaatctcatccctagtctattgcagttgtttctattagcttactgattaactcagtcctgacacaccttttgggaaatgctgatttaaacttcttaactggcaacagttggaacagtaatcagtttgctaacatatttaaagtcttgaatgttgaagaactcatgtgatttacccttttcaactttttggaaaacgatttaatttaatccaattagattaaccctattaaatcttgggttgggtatccaaatgaatgccagtccgatgttgccagacacgaaattgggagccagggatctcacgaaatgcagttcatcccacgcggaggtagcacaagccttttgctcttagccgagagatga

SEQ ID NO: 618 - DNA, 2529 bp, Homo sapiens
gcgctgtttgtggcccaggtgcaggaagcttacgcggtggcagccgctcgctgaggtagtctctcgcggcgccggggatccctgaacacagacagcgcgggactgagaaggaaagcttctttctgggcagccagagccgcaaaggtggagccgcgttggcgccctccgcgggaccagcgcctcggatgcgggcggacgcggggggccgcggctgcgggagcgcgaacggcgkgccaggggcgcctcatgtgagagccgcgggacctgcagccgccgccgtccccggagcacgggtkgtgtgtgggggaagccgcccccggcagcargtggacagcagcaaggaatcagctgaagcagcttgtgatatactatcgcaacttgtgaattgctctttaaaaacacttggacttatttcaactgctcgaccaagctttatggatttaccaaagtctcactttatctctgcactgacagttgtgttcgtaaactccaaatccctgtcttcgcttaagatagatgatactccagtagatgatccatctctcaaagtactagtggccaacaatagtgatacactcaagctgttgaaaatgagcagctgtcctcatgtctctccagcaggtatcctttgtgtggctgatcagtgtcacggcttaagagaactagccctgaactaccacttattgagtgatgagttgttacttgcattgtcttctgaaaaacatgttcgattagaacatttgcgcattgatgtagtcagtgagaatcctggacagacacacttccatactattcagaagagtagctgggatgctttcatcagacattcacccaaagtgaacttagtgatgtatttttttttatatgaagaagaatttgaccccttctttcgctatgaaatacctgccacccatctgtactttgggagatcagtaagcaaagatgtgcttggccgtgtgggaatgacatgccctagactggttgaactagtagtgtgtgcaaatggattacggccacttgatgaagagttaattcgcattgcagaacgttgcaaaaatttgtcagctattggactaggggaatgtgaagtctcatgtagtgcctttgttgagtttgtgaagatgtgtggtggccgcctatctcaattatccattatggaagaagtactaattcctgaccaaaagtatagtttggagcagattcactgggaagtgtccaagcatcttggtagggtgtggtttcccgacatgatgcccacttggtaaaaactgcatgatgaatagcaccttaatttcaagcaaatgtattataattaaagttttatttgctgtagttctgatataattctactattttgtggcacagaaatttgatatcttcagtcagtatatgtaaagattgtttatcggaagacccatgaatgagttttggtcagaaaattccacttgtttccttagtgtaatagcagtcatatctccgaattttttttaatgtggttcggatgtgaaataaccagttatacgtattaaacagtttacagtctaaaggaaacaaaacctatatgttataatatccaagaagtactaataggttttctgaaatgttatattctctatgcatttaaaaaaaaatgtaaacttgacattttagggtcttcagttacacatacacctgttataaggtgtttaatatagctcaggaaagtgagcattttgtgagaaaaatgaatatatcatatctaatggaaaagattggatgaatgttctcaaatgttacaaagctgtttaaagaaaaaggtatatataagtaatcagaacacttagaagactgatagatgtcacacagtggtattatagaaggataatacagagccaagatcaaattaaaagacaataaatggaacagaagggaggcagtgtttagctttgtataaacttttaggtttgctctgtaatctgctaaaccatatacattcttttgtgatatgttattatgtatgtggcacttgaggcactgtatgtaaagtaaggaatgctttactagttctccttggttttatctttgtttaaactagctttaaagtattaaacaataattgaaatgaaaagcttacctattttaaaaagccaaatttaaataaatatagaactttaaaatgtttatcagttgtttccatgaaagaatattagtttccagtaaattttagtgatggctcactcacttttctattttggaattacatagttatgtaagtaaaatttttaaaaatcataaagggagcaccattgtacagtctagcataaacagcaaattttaaagaggacatatttaagttcataatcatatttttcagtaaatattgctcagtgaactggaaaactttaatagaaaaatgtctgcagttttgtgattgttaatttggttaaaccgatattttatattatttaagttaggtaacattttatattactttcatatgaataaaagtaatccatgcattgtaaaaaaaaaaaaaaaaaaaaaaaaaaa

SEQ ID NO: 619 - DNA, 551 bp, Homo sapiens
  misc feature (6): n equals a,t,g, or c
gcgagnagggcagtgacactgagcgggcgcagggggccgagtcggagaccgtgccggagttcgggagcggcaacagagtgggcatagacactccgagcagcctcgccgtcgtctctgcgttcctgttgactgcctggctgccccctcccctactcctcggttcctggtgaagaggctgcgcgctgctgtttggggagggggtgtgtggagccgggtcctgtgtccgcagtggctgctgtcggggggtcgcctgttcgcggaggtgcggagagactccttgggggtcgagcacataacggggttcgggtgtctcgtgtgtgaacatcacagggtttgtggatgcacttagatgtttgcaatgagcactgtggctggcatgccccagtgttttggataccaatgcataggactccatagtaatcgaatttaccagaggcgaacgtcatgsagcatagtgatcccattgggggttgatacagcagagacgtcawacttggraaatggctgcargttcagaaymagtawttaaaattggttacaaaagcaaaaaa

SEQ ID NO: 620 - DNA, 1735 bp, Homo sapiens
ctcctcacttcttgactgtatttgtactatgttgaaaaaatatcctgtccacaaagacataagcctaacaacctagaaaaacaacagggtactactggcattacagaacttctttgcctttcaaaacaaaagcaaaacacagtgaacttcaccacggagctgcacagcgtggggaactcatccatcactttcaaaattagagtcatttgatccaagttggagtcagacacagtatttgagctgcacggcttctgggttctcccaccttatttgatcatattcgaaagattatttcctgtgtttgctttgatttgttcctcagtacattaaaatgatccacaccttgaacactgccctctctagaaggttgattttgatcagccttttgaagatgggtgtcgtttccctaacttatctcacagaattttgagtgttgtatttggcaagttctgagatttgccttctgtcttatgccaaacacccctttctaagagctgtccccgcttagttttagaagtactaggggttttcatacttattttatagaacacccatttatatttatttctgtatatagaactaaaaaaaacagtagtgttaaaaatctttgttgtggtttgagcatctttgctgcttttggattgagatggcgaatcaaggcttcacttcctctctcttctgtctttagaaagctgtgatcgtgcgtgcaattatttgaaaggcaacatagtcaattaagaaacctgtagttgttaaggaagaaattgttggcaagatatccatactgcccatatctcgttggtgcaataattaaatagcaaaggaaatctgtattggcaactattataattcaataattcttttgtttactgcccttttctgttcaagaattttctggaaattactccctttcacatggttgaactcttaagttgaccagttctcatagctctatcactagaatggtttgcagataccccaaacatactatgataaaatcaaattgtgctacttttgacccatgtaatttacctaaaagttgtaattgctgacagagtactgccttgaattttggtttaaaacctctctagtttcaatgacaagtaacaactcaaataattccatattgtttgaggargrggccataatccttctgaattgttggcactaagtaatgggatttggcccagtaagtatgayggtcgtgtcgcctaaccaacgcagagcagtgctttttgtgtggctgaagcgatgtgctgacgaaaaaaggaaaattctaggacaatcgttggctaaaaatcaccttaggatgaaaaatttgaggcaaatttttttaaatgacagaaaaagataatcatctcacttgcttgaaacaggagccagcatgatctctggaagcatcaactatccctcgtcgtgattgttgaaagctctttcactgttttgcattctagtttgaatagtttgtattgaaattggattcctatcttgtgtatgtttttggtgcgtaaaagggaaaaattggtgtcattacttttgaaatttgcaggacgaagggcatgcttttggtttgctgtaagattgtattctgtatatatgttttcatgtaaataaatgaaaatctatatcagagttatattttaatttttattctaaatgaaaaaaaccctttttacttcaaaaaaattgtaagccacattgttaataaagtaaaaataaattctaaaaaaaaaaa

SEQ ID NO: 621 - DNA, 1026 bp, Homo sapiens
tccggaattcccgggtcgacccacgcgtccgctttcatctgaccatccatatccaatgttctcatttaaacattacccagcatcattgtttataatcagaaactctggtccttctgtctggtggcacttagagtcttttgtgccataatgcagcagtatggagggaggattttatggagaaatggggatagtcttcatgaccacaaataaataaaggaaaactaagctgcattgtgggttttgaaaaggttattatacttcttaacaattctttttttcagggacttttctagctgtatgactgttacttgaccttctttgaaaagcattcccaaaatgctctattttagatagattaacattaaccaacataattttttttagatcgagtcagcataaatttctaagtcagcctctagtcgtggttcatctctttcacctgcattttatttggtgtttgtctgaagaaaggaaagaggaaagcaaatacgaattgtactatttgtaccaaatctttgggattcattggcaaataatttcagtgtggtgtattattaaatagaaaaaaaaaattttgtttcctaggttgaaggtctaattgatacgtttgacttatgatgaccatttatgcactttcaaatgaatttgctttcaaaataaatgaagagcagctgtccttctttcctcttttaagtgttcagctgtggcatgctcagaggttcctgctggattccagctggagcggtgtgatacccttctttttcagctgttcgtgccttcctttcttgtatccaccaaagtggagacaaatacatgatctcaaagatacacagtacctacttaattccagctgatgggagaccaaagaatttgcaagtggatggtttggtatcactgtaaataaaaagagggcctgggaattcttgcgattccatctctactttgtataagtctcattttgtgccttacacatctgcagtatttatcatgttccaacttggtgactgtcaggcagtgcaatacatc

SEQ ID NO: 622 - DNA, 670 bp, Homo sapiens
  misc feature (598): n equals a,t,g, or c
  misc feature (645): n equals a,t,g, or c
  misc feature (649): n equals a,t,g, or c
gtggtaggcgcgctgcgtaaagaggcctgcrgtcccgcggcgcggggcaggttccgggctgcttaggttggcaccggtccgtggtccccgggggcgcagtcgcagcgctcccgccctccaggcgtcagcgagtgcgcggtccagtgcggccggaacctggcgcaactcctagagcggtccttggggagacgcgggtcccagtcctgcggctcctactggggagtgcgctggtcggaagattgctggactcgctgaagagagactacgcaggaaagccccagccacccatcaaatcagagagaaggaatccaccttcttacgctatggcaggtaagaaagtactcattgtctatgcacaccaggaacccaagtctttcaacggatccttgaagaatgtggctgtagatgaactgagcaggcagggctgcaccgtcacagtgtctgatttgtatgccatgaactttgagccgagggccacagacaaagatatcactggtactctttctaatcctgaggttttcaattatggagtggaaacccacgaagcctacaagcaaaggtctctggctagcgacatyactgatgagcagaaaaaggnttcgggaaggctgacctartgatatttcaagttcccgttgtactggntcancgtgccrgccattcttgaaag

SEQ ID NO: 623 - DNA, 2163 bp, Homo sapiens
  misc feature (29): n equals a,t,g, or c
gaattcggcacgagggacgctgagcgganccgcgggcgggagggcggacggaccgactgacggtagggacgggaggcgagcaagatggcgcagacgcagggcacccggaggaaagtctgttactactacgacggggatgttggaaattactattatggacaaggccacccaatgaagcctcaccgaatccgcatgactcataatttgctgctcaactatggtctctaccgaaaaatggaaatctatcgccctcacaaagccaatgctgaggagatgaccaagtaccacagcgatgactacattaaattcttgcgctccatccgtccagataacatgtcggagtacagcaagcagatgcagagattcaacgttggtgaggactgtccagtattcgatggcctgtttgagttctgtcagttgtctactggtggttctgtggcaagtgctgtgaaacttaataagcagcagacggacatcgctgtgaattgggctgggggcctgcaccatgcaaagaagtccgaggcatctggcttctgttacgtcaatgatatcgtcttggccatcctggaactgctaaagtatcaccagagggtgctgtacattgacattgatattcaccatggtgacggcgtggaagaggccttctacaccacggaccgggtcatgactgtgtcctttcataagtatggagagtacttcccaggaactggggacctacgggatatcggggctggcaaaggcaagtattatgctgttaactacccgctccgagacgggattgatgacgagtcctatgaggccattttcaagccggtcatgtccaaagtaatggagatgttccagcctagtgcggtggtcttacagtgtggctcagactccctatctggggatcggttaggttgcttcaatctaactatcaaaggacacgccaagtgtgtggaatttgtcaagagctttaacctgcctatgctgatgctgggaggcggtggttacaccattcgtaacgttgcccggtgctggacatatgagacagctgtggccctggatacggagatccctaatgagcttccatacaatgactactttgaatactttggaccagatttcaagctccacatcagtccttccaatatgactaaccagaacacgaatgagtacctggagaagatcaaacagcgactgtttgagaaccttagaatgctgccgcacgcacctggggtccaaatgcaggcgattcctgaggacgccatccctgaggagagtggcgatgaggacgaagacgaccctgacaagcgcatctcgatctgctcctctgacaaacgaattgcctgtgaggaagagttctccgattctgaagaggagggagaggggggccgcaagaactcttccaacttcaaaaaagccaagagagtcaaaacagaggatgaaaaagagaaagacccagaggagaagaaagaagtcaccgaagaggagaaaaccaaggaggagaagccagaagccaaaggggtcaaggaggaggtcaagttggcctgaatggacctctccagctctggcttcctgctgagtccctcacgtttcttccccaacccctcagattttatattttctatttctctgtgtatttatataaaaatttattaaatataaatatccccagggacagaaaccaaggccccgagctcagggcagctgtgctgggtgagctcttccaggagccaccttgccacccattcttcccgttcttaactttgaaccataaagggtgccaggtctgggtgaaagggatacttttatgcaaccataagacaaactcctgaaatgccaagtgcctgcttagtagctttggaaaggtgcccttattgaacattctagaaggggtggctgggtcttcaaggatctcctgtttttttcaggctcctaaagtaacatcagccatttttagattggttctgttttcgtaccttcccactggcctcaagtgagccaagaaacactgcctgccctctgtctgtcttctcctaattctgcaggtggaggttgctagtctagtttcctttttgagatactattttcatttttgtgagcctctttgtaataaaatggtacatttctataaaaaaaaaaaaaaaaaaaaaaaaaaaaaaaaaaaaaaaaaaaaaaaaa

SEQ ID NO: 624 - DNA, 601 bp, Homo sapiens
  misc feature (562): n equals a,t,g, or c
  misc feature (566): n equals a,t,g, or c
  misc feature (600): n equals a,t,g, or c
ggcgagatcttctctgtggcggagacagccaggttggcagctgacgggacagccggggtctattttgttgcgggttttcagcaaatccagggctggtctggaggcgcgaaaacttaaggcatacagaacgatggagtatatggcagaatccaccgaccgcagccctggacacatcttgtgctgtgagtgtggtgttccgataagtccaaatcctgccaatatttgtgtggcctgtttgcgaagtaaagtggacatcagccaaggtattccgaaacaagtctcgatttcgttctgcaaacaatgtcaaaggtattttcaaccaccaggaacttggatacagtgtgctttagaatccagggaacttcttgctttgtgcttgaaaaaaatcaaagcccctctgagtaaggtacggcttgtagatgcaggctttgtttggactgagcctcattctaagagacttaaagktaaactgactattcagaaagaggtgatgaatggtgctatccttcaacaagtgtttgtggtggattatgktgkccccaaatggggggagatggcatanaganaactaaggattctggaaaggttggattaaggggng

SEQ ID NO: 625 - DNA, 593 bp, Homo sapiens
gatgcagtttgcttggcagagctataagcgttatgcaatggggaaaaacgaactccgtccactaacaaaagatggctacgagggtaacatgttcggaggcctcagcggggcaacagtcattgactccctcgataccctctacctcatggagctgaaggaggagttccaggaggccaaggcctgggtgggagagagcttccacctgaacgtgagcggagaagcatccttgtttgaggtgaacatccgctacatcgggggactcctctcagccttctacctgacaggagaagaggtgttccgaataaaggccatcaggctgggagagaagctcctgccggcgttcaacacccccacgggaatcccaaagggcgtggtgagcttcaaaagtgggaactggggctgggccacagccggcagcagcagcatcttggcggagtttggatccctgcacttggaattcttacacctcactgaactctctggcaaccaggtcttcgctgaaaaggtcaggaacatccgcaaggtcctcaggaagwtcgaaaagccctttggcctytactccaactkagmcatggtgttgcaaacagatcccc

SEQ ID NO: 626 - DNA, 2272 bp, Homo sapiens
  misc feature (2267): n equals a,t,g, or c
gcggcacgaggctgacacgggagggtcctcagctaaagccaaaagcagatcaaagtggtgggactcgcgtcgcggccgcggagacgtgaagctctcgaggctcctcccgctgcgggtcggcgctcgccctcgctctcctcgccctccgccccggccccggccccgcgcccgccatggagaagactgagctgatccagaaggccaagctggccgagcaggccgagcgctacgacgacatggccacctgcatgaaggcagtgaccgagcagggcgccgagctgtccaacgaggagcgcaacctgctctccgtggcctacaagaacgtggtcgggggccgcagtccgcctggagggtcatctctagcatcgagcagaagaccgacacctccgacaagaagttgcagctgattaaggactatcgggagaaagtggagtccgagctgagatccatctgcaccacggtgctggaattgttggataaatatttaatagccaatgcaactaatccagagagtaaggtcttctatctgaaaatgaagggtgattacttccggtaccttgctgaagttgcgtgtggtgatgatcgaaaacaaacgatagataattcccaaggagcttaccaagaggcatttgatataagcaagaaagagatgcaacccacacacccaatccgcctggggcttgctcttaacttttctgtattttactatgagattcttaataacccagagcttgcctgcacgctggctaaaacggcttttgatgaggccattgctgaacttgatacactgaatgaagactcatacaaagacagcaccctcatcatgcagttgcttagagacaacctaacactttggacatcagacagtgcaggagaagaatgtgatgcggcagaaggggctgaaaactaaatccatacagggtgtcatccttctttccttcaagaaacctttttacacatctccattccttattccacttggatttcctatagcaaagaaacccattcatgtgtatggaatcaactgtttatagtcttttcacactgcagctttgggaaaacttcattccttgatttgtgtttgtcttggccttcctggtgtgcagtactgctgtagaaaagtattaatagcttcatttcatataaacataagtaactcccaaacacttatgtagaggactaaaaatgtatctggtatttaagtaatctgaaccagttctgcaagtgactgtgttttgtattactgtgaaaataagaaaatgtagttaattacaatttaaagagtattccacataacttcttaatttctacattccctcccttactcttcgggggtttcctttcagtaagcaacttttccatgctcttaatgtattcctttttagtaggaatccggaagtattagattgaatggaaaagcacttgccatctctgtctaggggtcacaaattgaaatggctcctgtatcacatacggaggtcttgtgtatctgtggcaacagggagtttccttattcactctttatttgctgctgtttaagttgccaacctcccctcccaataaaaattcacttacacctcctgcctttgtagttctggtattcactttactatgtgatagaagtagcatgttgctgccagaatacaagcattgcttttggcaaattaaagtgcatgtcatttcttaatacactagaaaggggaaataaattaaagtacacaagtccaagtctaaaactttagtacttttccatgcagatttgtgcacatgtgagagggtgtccagtttgtctagtgattgttatttagagagttggaccactattgtgtgttgctaatcattgactgtagtcccaaaaaagccttgtgaaaatgttatgccctatgtaacagcagagtaacataaaataaaagtacattttataaaccatttactatggctttgtaacaattgcatacccatattttaagggacaggtgaatttactactttctaaagtttattgatacttcccttttatgtaaaatgtagtagtgatacctatatttccacattgtgcattgtgacacacttgtctagggatgcctggaagtgtataaaattggactgcatttcttagagtgttttactatagatcagtctcatgggccatctcttcctcagatgtaaatgatatctggttaagtgttatatggaataaagtggacattttaaaactarmaaaaaaaaaaaaaaaaaaaaaaaaaaaaaaaaaaaaaaaaaaaaanaaata

SEQ ID NO: 627 - DNA, 871 bp, Homo sapiens
  misc feature (12): n equals a,t,g, or c
  misc feature (863): n equals a,t,g, or c
gggagcggaggncaggaacccaataagctgcttcgcctcggagctgaagcccgtactcaagatggcggctccgggcgggcgtggccagtgactagaaggcgaggcgccgcgggaccatggcggcggcggcggacgagcggagtccagaggacggagaagacgaggaagaggaggagcagttggttctggtggaattatcaggaattattgattcaracttcctctcaaaatgtgaaaataaatgcaaggttttgggcattgacactgagaggcccattctgcaagtggacagctgtgtctttgctggggagtatgaagacactctagggacctgtgttatatttgaagaaaatgttgaacatgctgatacagaaggcaataataaaacagtgctaaaatataaatgccatacaatgaagaagctcagcatgacaagaactctcctgacagagaagaaggaaggagaagaaaacataggtggggtggaatggctgcaaataaaggataatgatttctcctatcgacccaacatgatttgtaactttctacatgaaaatgaagacgaagaagtggtagcttcagccccagataaatctttggaattggaagaggaagagattcaaatgaacgacagttcaaacctgagttgtgaacaggagaaaccaatgcacttggaaatagaagattctggtcctcttattgatataccttctgagacagaaggttctgtttttatggaaactcaaatgctgccttagaaatcactcctagatgaaatgtttctcataataacttgtcaagaactttttagagttgttacataaaaataattgctgtgtaaaaaaaaaaaaaaaaaaaaaaanaaaaaaat

SEQ ID NO: 628 - DNA, 779 bp, Homo sapiens
  misc feature (23): n equals a,t,g, or c
ggcctggcaggaattcgggcagnggcccggggcargatggcagcggcgctgcgcgtgcgttgttgagtgttcgggacgccggcctgcaggcgccatggtcttcctcaccgcgcagctctggctgcggaatcgcgtcaccgaccgctactttcggatccaggaggtgctgaagcacgccaggcacttccggggaaggaaaaatcgctgctacaggttggcggtcagaaccgtgattcgagcctttgtgaaatgcaccaaagcccgatacctgaagaaaaagaacatgaggaccctctggattaatcgaattacagctgctagccaggaacatggactgaagtatccagcgctcattgggaatttagttaagtgccaggtggagctcaacaggaaagtcctagcggatctggccatctacgagccaaagactttcaaatctttggctgccttggccagtaggaggcgacacgaaggatttgctgctgccttgggggatgggaaggaacctgaaggcattttttccagagtggtgcagtaccactgaggactgttgctgtattgattaggaaaagagacagagtaatttgcagtttgtttgatttatacttttgtttatctacaacccaataacagacatgagggatggccctgtctctctgggacagagcctcacagatgatgtccatgttttgtgtgaatgaaactcaaacactcttcaaaaaaaaaaaaaaaaaaaaaaaaaaaaaaaaaaaaaaaaaaaaaaaaaaaaaaaaaaaaaa

SEQ ID NO: 629 - DNA, 1835 bp, Homo sapiens
  misc feature (1835): n equals a,t,g, or c
gcgggcccgtacgccgattccatatgggcgccggcgcggagcgccgcggggcagcgcggggtcgccatggctgagctgcagcagctccgggtgcaggaggcggtggagtccatggtgaagagtctggaaagagagaacatccggaagatgcagggtctcatgttccggtgcagcgccagctgttgtgaggacagccaggcctccatgaagcaggtgcaccagtgcatcgagcgctgccatgtgcctctggctcaagcccaggctttggtcaccagtgagctggagaagttccaggaccgcctggcccggtgcaccatgcattgcaaygacaaagccaaagattcaatagatgctgggagtaaggagcttcaggtgaagcagcagctggacagttgtgtgaccaagtgtgtggatgaccacatgcacctcatcccaactatgaccaagaagatgaaggaggctctcttatcaattggaaaataaaagtatttgccagtggccatcagggctgagggcaagaatatattttttataaggaattgggaattttagtcttttaagcaaagtttacgaatgaagaaatgaaggatggccacaagcgtaaggcatatgtcacttgcctctggacactggttattttatgtttcagtccctaaaaaatgaaatggaaaaaagtggtgctaaatcgagtcagagatattacaggagagttttagagcttattatttcctgtggccagtgcttgtcctggcagtaaggctytcccctgtaacaagccagagccctccaaggtaccagactcttcttactacacaggtactaacaggctggcaggttagagttggtggagtctgaggagagatattttctctttgttgccaacatcctgtttaccaaaagtgtcaccccaccatcttccataagctgtgaaacaaaatcaatgaggtcactaacttagaagggaaagaaagttttctgggtctttgttttcttgatttggggtaatttatacaagggcatacaagttgattttaagatgtggaactgggaggtagactagtttggataagaactttgaaatgttccttgtggatccccatttctggtcatcaagatgtggatgtacatttcttaaaattattacatgctgcatctttcagcctggagactgtgcagaaacatgagaggtgatgacacactaattatgggaagcagaattactggctgatggcccctgaggctgtgtgtaacaaaatgacaggacaatcttgcagtaacactttccccttgaagagaagggggttttgattgtgatatatactagtatctaggaatgaacagtaaaagaggagcagttggctacttgattacaacagagtaaatgaagtactggatttgggaaaacctggttttattagaacatatggaatgaaagcctacacctagcattgcctacttagccccctgaattaacagagcccaattgagacaaacccctggcaacaggaaattcaagggagaaaaagtaagcaacttgggctaggatgagctgactcccttagagcaaaggagagacagcccccattaccaaataccatttttgcctggggcttgtgcagctggcagtgttcctgccccagcatggcaccttattgttttgatagcaacttcgttgaattttcaccaacttattacttgaaattataatatagcctgtccgtttgctgtttccaggctgtgatatattttcctagtggtttgactttaaaaataaataaggtttaattttctccccaaaaaaaaaaaaaaaaaaaaaaaaaaaaaataaaaaaatn

SEQ ID NO: 630 - DNA, 1097 bp, Homo sapiens
  misc feature (13): n equals a,t,g, or c
ggcttggattttngtttcctattagaaaccaacagttttgttctaatttcatttcatttggagctaagatgactaatttgatgattttcgatctcttttcccctgtcctgattttaaaagccccctccttttttttttttttttttttttctttttttaggcatatgtagtaatattagaaacatttaatttgggaaactttgattcttgaaagagaaaacaaaagcatgtgaataaactttgaagtgttcacctcagtttgggaccaaactgcttggatctttgtaaaaaccggttttgtatgtcaaggaggagtttaaggcctttccgaccaccttgtgttccccttttctgcgcascatgtatcacgtggagttgctccttaccacacctcacgtgcccctgagccctatttcctgatttcttctgggctggacttccccgttctccaccagcagctccagtatcccaaactttctagtcctgctgatcctcccagcaacggggtggaaactggagggcagtgtctggtctgttttctaagaaacttatgaattctattatctttacaaatatgagaaaattttttcaatattttttattaatctttttataaaatgaaaagaaactcctatgatcgattaaggaaggtggttatggctgggtggttcaggggtttttttgggtttcttttttttttctttgtctttttaaccttaagctgtttaagttgaagcattctcagatgtttggggggaaacatcctcttaaaatgggtccttgtgcttgccttctggggaggcggtcctgagcaggtgaatcataaggcatttatgcatatgttatatgcggactgcacccacctctcccccccagcctttgcctcttgggttgttgtgctgctttccccttactttgctacatttctatagttaagttggttttacttgaatgattcatgtttagggggaaaatgaaaatctcccttaaaatttgtttcaactcctcctgcaaataaaataaatgaagtggcagatgtaaaaaaaaaaaaaaaaaaaaaaaaaaaaaaaaaaaaaaaaaaaaaaaaaaaaaaaaaa

SEQ ID NO: 631 - DNA, 1537 bp, Homo sapiens
  misc feature (5): n equals a,t,g, or c
cagtnaccggtccggaattcccgggtcgacccacgcgtcgcacggggaaaaggtggctctggccggggtggctcggtttcctggggctatgtaactgagctcgtcgacttaggggtccttcttcgctgccctcgccgcgtgctagcagggagtttccgctcgggagagagactgtcctcacgcccgctgcgcctcctcgacggcagagcaggcttgctcgcccgtgggagcgtcccggccgagaagccctgaggggggaggggaggccattttgtcccgaccgactccccggaaccgggcggagcggctgggagaggctgcggagccgcggtcgccgccctcggaggcactggacgccgccactgtcggggcttcctcaaagctgttcgtaggtcgcccgcgccgtctcgagcctttttcccacgcttccccggtcctccggcctgagaacgcccgagtgaggagttggccgtagtgagagggaccgatcccttggggccgccggcggcgagagcccgagccgctcctcccaatggcgaagaagacgtacgacctgcttttcaagctgctcctgatcggggattccggagtggggaagacctgcgtcctttttcgtttttcggatgatgccttcaatactacctttatttccaccataggaatagacttcaagatcaaaacagttgaattacaaggaaagaagatcaagctacagatatgggatacagcaggccaggagcgatttcacaccatcacaacctcctactacagaggcgcaatgggtatcatgctagtatatgacatcaccaatggtaaaagttttgaaaacatcagcaaatggcttagaaacatagatgagcatgccaatgaagatgtggaaagaatgttactaggaaacaagtgtgatatggacgacaaaagagttgtacctaaaggaaaaggagaacagattgcaagggagcatggtattaggttttttgagactagtgcaaaagcaaatataaacatcgaaaaggcgttcctcacgttagctgaagatatccttcgaaagacccctgtaaaagagcccaacagtgaaaatgtagatatcagcagtggaggaggcgtgacaggctggaagagcaaatgctgctgagcattctcctgttccatcagttgccatccactaccccgttttctcttcttgctgcaaaataaaccactctgtccatttttaactctaaacagatatttttgtttctcatcttaactatccaagccacctattttatttgttctttcatctgtgactgcttgctgactttatcataattttcttcaaacaaaaaaatgtatagaaaaatcatgtctgtgacttcatttttaaatgtacttgctcagctcaactgcatttcagttgtattatagtccagttcttatcaacattaaaacctatagcaatcatttcaaatctattctgcaaattgtataagaataaagttagaattaacaatttaaaaaaaaaaaaaaaactcgagggggggccccggtacccaac

SEQ ID NO: 632 - DNA, 1901 bp, Homo sapiens
  misc feature (1566): n equals a,t,g, or c
  misc feature (1894): n equals a,t,g, or c
  misc feature (1899): n equals a,t,g, or c
  misc feature (1900): n equals a,t,g, or c
ggcatccagtttagcaacakcagagatgacgactctgcgattctgagagtccctggcgagcccgggctagcgaaaagtgggggcagaacgaactacatctcccatcgtgccaggaggcggtcccgcccgtttccccctgggagttgtagtctaaccccctcggatccaacagcaacctcagtgcgtgaactctgttatccagaaggcctcgccctgccgccgccgaagctggaattcgtcggctagtagttctcgccggcaactagaggaacctgttggcgtggcccagaaggcttagcgggattgcacgagccctcagattcatcgctaccccgaggctaagcgccatgcctcatattgacaacgatgtgaaactggacttcaaggatgtccttttgaggcccaaacgcagtacccttaagtctcgaagtgaggtggatctcacaagatccttttcatttcggaactcaaagcagacatactctggggttcccatcattgctgccaatatggatactgtgggcacctttgagatggccaaggttctctgtaagttctctctcttcactgctgtccataagcactatagcctcgttcagtggcaagagtttgctggccagaatcctgactgtcttgagcatctggctgccagctcaggcacaggctcttctgactttgagcagctggaacagatcctggaagctattccccaggtgaagtatatatgcctggatgtggcaaatggctactctgaacactttgttgaatttgtaaaagatgtacggaagcgcttcccccagcacaccatcatggcagggaatgtggtaacaggagagatggtagaagagctcatcctttctggggctgacatcatcaaagtgggaattgggccaggctctgtgtgtactactcggaagaaaactggagtggggtatccacagctcagcgcagtgatggagtgtgcagatgctgctcatggcctcaaaggcacatcatttcagatggaggttgcagctgtcctggggatgtggccaaggcttttggggcaggagctgacttcgtgatgctgggtggcatgctggctgggcacagtgagtcaggtggtgagctcatcgagagggatggcaagaagtacaagctcttctatggaatgagttctgaaatggccatgaagaagtatgctgggggcgtggctgagtacagagcctcagagggaaagacagtggaagttccttttaaaggagatgtggaacataccatccgagacatcctaggagggatccgctctacgtgtacctatgtgggagcagctaagctcaaagagttgagcaggagaactaccttcatccgagtcacccagcaggtgaatccaatcttcagtgaggcgtgctagacctgagcagttctaccctcccaaggcaccagtactctaccatggggcatcccaagtggggtcctcacccatcccagctactgcagctctgtattactttgtcatttcctgttgtctcactcctgagggctcctgcagtaactctgtacttctctatctgcacacacaaaatncccaaggcactcactggggaggaagcaaggaagcaaacagtctgagaaaatgatgcaagaaaatcaaatgggaatctggggacccaacacaacatcctgaagattattaaaaggaaaagatgctgattggtacataaatcttttacatggccttggtctagaggaggcaggcttttagaatcatgttttgttaatccgcttcactaaattggaccttcacatatctaaaaagctctgaagtgtttgtatatttgaaatacctcaataaagagagagctcattgactgtaaaaaaaaaaaaaaaaaaaaaggggggccgctttaaaggnccaannt

SEQ ID NO: 633 - DNA, 1750 bp, Homo sapiens
  misc feature (809): n equals a,t,g, or c
  misc feature (821): n equals a,t,g, or c
  misc feature (1676): n equals a,t,g, or c
  misc feature (1689): n equals a,t,g, or c
  misc feature (1712): n equals a,t,g, or c
gagacgacaaccaccaccttatggcgccgaaacgccaacggggaccctgtctgcaacgcctgtggcctctactacaagctgcacaatgttaacaggccactgaccatgaagaaggaagggatccagactcggaaccggaagatgtccaacaagtccaagaagagcaagaaaggggcggagtgcttcgaggagctgtcaaagtgcatgcaggagaagtcatcccccttcagtgcagctgccctggctggacacatggcacctgtgggccacctcccgcccttcagccactccggacacatcctgcccactccgacgcccatccacccctcctccagcctctccttcggccacccccacccgtccagcatggtgaccgccatgggctagggaacagatggacgtcgaggaccgggcactcccgggatgggtggaccaaacccttagcagcccagcatttcccgaaggccgacaccactcctgccagcccggctcggcccagcaccccctctcctggagggcgcccagcagcctgccagcagttactgtgaatgttccccaccgctgagaggctgcctccgcacctgacygctgcccaggtggggtttcctgcatggacagttgtttggagaacaacaaggacaactttatgtagagaaaaggaggggacgggacagacgaaggcaaccatttttagaaggaaaaaggattaggcaaaaataatttattttgctcttgtttctaacaaggacttggagacttggtggtctgagctgtcccaagtcctccggttcttcctcgggattggcggntccacttgccanggctctgggggcagatttgtggggacctcagcctgcaccctcttctcctctggcttccctctctgaaatagccgaactccaggctgggctgagccaaagccagagtgccacggcccagggagggtgagctggtgcctgctttgacggsccagcctggagggcagagacaatcacgggcggtcctgcacagattcmcaggccagggctgggtcacaggaaggaaacaacattttcttgaaaggggaaacgtctcccagatcgctcccttggctttgaggccgaagctgctgtgactgtgtccccttactgagcgcaagccacagcctgtcttgtcaggtggaccctgtaaatacatcctttttctgctaacccttcaaccccctcgcctcctactctgagacaaaagaaaaaatattaaaaaaatgcataggcttaactcgctgatgagttaattgttttatttttaaactctttttgggtccagttgattgtacgtagccacaggagccctgctatgaaaggaataaaacctacacacaaggttggagctttgcaattctttttggaaaagagctgggatcccacagccctagtatgaaagctgggggtggggaggggcctttgctgcccttggtttctgggggctggttggcatttgctggcctggcagggggtgaaggcaggagttgggggcaggtcaggaccaggacccagggaraggctgtgtccctgctggggtctcaggtccagctttactgtggctgtctggatccttcccaaggtacagctgtattatyaaacgtkttcccgagcttaagattctgttatgcggtgacggcggggttttggttggcntttgaggggcccntgccaggggaggaaggattttgntgatgtaagtgaccaagtgcaatattggtccggcattc

SEQ ID NO: 634 - DNA, 1926 bp, Homo sapiens
  misc feature (13): n equals a,t,g, or c
gcggcgcgcgcanagatcgcgcacttctacggccgcctctactccgagagctcacgccgcgttctcctcggccgcctctggcgccggctgcacggccgtcctggccatgcctctgccttgatggcggcgttagcggcgtcttcgtttgggacgaggagaggatccaggaggaggagttgcagagatctattaatgagatgaagcggttggaagaaatgtcaaatatgtttcagagctctggagtccagcaccaccctccagaaccaaaagcccaaacagaagggaatgaagattcagagggcaaagagcaacgttgggaaatggtgatggataagaaacactttaagctgtggcggcgcccaattacaggcacccacctttaccagtaccgagtttttggaacctacacagatgtgacacctcggcagttcttcaatgttcagctggacacagagtatagaaaaaaatgggatgccctggtaatcaagctggaggtgattgagagggatgtggttagtggttccgaggttcttcactgggtaacccattttccttatccaatgtactcacgggattatgtttatgttcggcggtatagtgtggatcaggaaaacaacatgatggtgttggtgtcgcgtgctgtggagcatccgagtgtgccagagtctccagaattcgtcagggtcagatcatatgaatcccaaatggttatccgtccccacaagtcatttgatgagaatggctttgactacttactaacatacagtgacaatccccaaacggtgtttcctcgctactgtgttagttggatggtttccagtggcatgccagatttcctggagaagctgcacatggccactctgaaagccaagaatatggagattaaagtaaaggactacatctcagctaagcctctggaaatgagtagtgaagccaaggccaccagccagtcctctgagcgaaagaacgagggcagctgtggccctgctcggattgagtatgcttgacaggctttgggataagaagggacaaggtgcttctagccctgtctcagtccgttatcactctgctgtagaagggggacatgccacatgtattagaaggcatctgctgtaacttccagtgcaagataattcaataactgatgtcccatttcattcagagcccttattgctcttatcaaaacagaagaaggctacatttgtgggagtgttgtcatattctcaggccaactgttttgaaattcggtatctcactgagctaatctggaacaaacctctcacctcaggccagaaggggatgacctccatttgcttctctgagtagtttcctctgctgacattccaaatcccaccatcgattgtgcagcgctttggatttccttcagttctccaggtccacctggaaagtatagttggccagttgagtctctcaaatgaggggctactgggagtgctcttggtaacaatcatgatgtgaatgggtgtgaacgatacttggctatgttaagtgccttgtccgcaccttgcttttatctctagagacatgaagttattattaattttttttttttttaagtagagatggagtttcactctgtttcccaggctggtcttgaactcctgggccatgcctggccagggacatgaatttgtacaaagaaatttccctccctgcctgcacaatatcacccattgactcaccttatccaaagcaagtttcctgtgaatcggccagttcttctatattcattggatcattgcctccttcctgaaccttccccattttaccaaggaacatggggagactaatcctttttagatagtagctttttggatggctcaaaacatcacattttaaatttagttttaaaaattttttaacttttgkgkcaaaaagggggttgaggaatttagcaaggatctt

SEQ ID NO: 635 - DNA, 1346 bp, Homo sapiens
  misc feature (19): n equals a,t,g, or c
  misc feature (21): n equals a,t,g, or c
  misc feature (1342): n equals a,t,g, or c
ggctgcgagaagacgacanangggggcttttctctcgggtgatccggccgagtggccctgggttagcagctgctgcatttccccggctggctgcggtcactggtggcagtgctcaggcgcccgcgcccttgaccttcggccccgcgagctctaaccctacagcgcaggaagatcggccgccgcggccaggctctgatgctggtgtctggtagaagaaggttactcacagttctgctgcaggctcagaagtggccctttcaaccctccagagacatgagactagtgcagttccgggcaccccacctggtggggcctcacttgggcctggagacagggaatggtggaggggttatcaacctcaatgcctttgaccccacactcccgaagacgatgacgcagttcctagagcagggagaggccaccctctcagtggcaagaagagccctggctgcccagttgccagtcctaccacggtcggaggtaaccttcctggctccagtcacaygrccagataaggtggtgtgtgtgggcatgaattatgtggaccactgcaaagaacagaacgtgcccgtgcccaaggagcccatcatcttcagcaagtttgccagctccatcgtggggccctatgatgaggtggtcctcccaccacagagccaggaggtagattgggaagtggagctggccgtggtcattggaaagaaaggcaagcacatcaaggccacagatgctatggcccacgtggccggcttcactgtggctcatgacgtgagtgctcgtgactggcwaayragacgyaatgggaaacartggctgctgggaaaaaccttcgacaccttctgccctctgggccctgccttggtgaccaaggacagtgtagcagatccacacaacttaaagatctgctgccgagtgaatggggaagtsgtccagagcrgcaacaccaaccagatggtattcaagacagaggacctgatagcctgggtctcccagtttgttaccttttacccaggggatgtcatcctaactgggacccccccaggtgtcggtgtattcaggaaacctcctgtctttctcaagaagggggatgaagtccagtgtgagattgaagaactaggtgtcatcatcaacaaggtggtgtgatggctcctgcacaggccctgcacataggatgagggcatctgctcccactcagcctagcccagggaaaggcccagtgacaggtgtggacaggtgccagccctgcaagccgcctcttctcggtagaagggagaaggacagagctctcttcaataaattcgtcaggtcaaagcarmaaaaaaaaaaaaaaaaaaaaaaggggggncccc

SEQ ID NO: 636 - DNA, 1584 bp, Homo sapiens
gcggccgcctactactactactactactaaattcgcggccggtcgacggggagctgaattccggaagatccccacatcgatgaaagcaaagcgaagcaccaagccatcatcatgtccacgtcgctacgagtcagcccatccatccatggctaccacttcgacacagcctctcgtaagaaagccgtgggcaacatctttgaaaacacagaccaagaatcactagaaaggctcttcagaaactctggagacaagaaagcagaggagagagccaagatcatttttgccatagatcaagatgtggaggagaaaacgcgtgccctgatggccttgaagaagaggacaaaagacaagcttttccagtttctgaaactgcggaaatattccatcaaagttcactgaagagaagaggatggataaggacgttatccaagaatggacattcaaagaccaagtgagtttgtgagattctaacagatgcagcattttgctgctaccttacaagcttctcttctgtcaggactccagaggctggaaagggaccgggactggaaagggaccaggactgaacagactggttacaaagactccaaacaatttcatgccctgtgctgttacagaggagaacaaaatgctttcagcaaggatttgaaaactcttccgtccctgcaggaaaggattgatgctgatakaagagcctggacagatgtaatgagaactaaagaaaacagatggctggagatgacatttatccagggtcactttgtcaggccctaggacttaaatcgaagttgaacttttttttttttttaaccaaatagataggggaagggaggagggagagggaggacagggagagaaaataccatgcataaattgtttactgaatttttatatctgagtgttcaaaatatttccaagcctgagtattgtctattggtatagatttttagaaatcaataattgattatttatttgcacttattacaatgcctgaaaaagtgcaccacatggatgttaagtagaaattcaagaaagtaagatgtcttcagcaactcagtaaaaccttacgccaccttttggtttgtaaaaggttttttatacatttcaaacaggttgcacaaaagttaaaataatggggtcttttataaatccaaagtactgtgaaaacattttacatattttttaaatcttctgactaatgctaaaacgtaatctaattaaatttcatacagttactgcagtaagcattaggaagtgaatatgatatacaaaatagtttataaagactctatagtttctataatttattttactggcaaatgtcatgcaacaataataaattattgtaaactttgtggcttttggtctgtgatgcttggtctcaaaggaaaaaataagatggtaaatgttgatatttacaaacttttctaaagatgtgtctctamcaataaaagttaattttagagtagttttatattaattaccaaactttttcaaaacaaattcttacgtcaaatatctgggaagtttctctgtcccaatcttaaaatataaaatatagatatagaagttcaaaaaaaaaaa

SEQ ID NO: 637 - DNA, 1663 bp, Homo sapiens
ggctggaggcgccattggagccggcttggctggcgagcccggctgaggagcctcttgggycgcacttaccgccgcgtccgctcccggtccctggcccctcagcggcatggcgtgcggggcgacgctgaagcggcccatggagttcgaggcggcgctgctgagccccggctccccgaagcggcggcgctgcgcccctctgcccggccccactccgggcctcaggcccccggacgccgagccgccgccgccgtttcagacgcagaccccaccgcagagtctgcagcagcccgccccgcccggcagcgagcggcgccttccaactccggagcaaatttttcagaacataaaacaagaatatagtcgttatcagaggtggagacatttagaagttgttcttaatcagagtgaagcttgtgcttcggaaagtcaacctcactcctcagcactcacagcacctagctctccaggttcctcatggatgaagaaggaccagcccacatttaccctccgacaagttggcataatatgtgagcgcctcttaaaagactatgaagataaaattcgggaggagtatgagcaaatcctcaataccaaactagcagaacaatatgaatcttttgtgaaattcacacatgatcagattatgcgacggtatgggacaaggccaacaagctatgtgtcatgaagctttgtcacatatctgggtaccaggtttgacctcaagagatggctgctgtacactttttgcaactggtttgatgtcacatttcagctccaactttgcatcctgagaacacttaaacgtttctgcaggtccattttatacaacttgaaagaccgtaaaactttctggttgccacaagcatatctttcttttctgctcatccaataaacagctgtgccctactgtgatagattttccaaacaaaaatacctggagcagcagtttagcaaaatatgccttcagtggcattcaacaaatggagtttccccaagcacagttctgtaagaagtgcgtgtgagagtgtgtgtatatgtgtgtatgtgtattttaagttattatttgtattgtgcaaaaatttttttttgatcttggggattctggctgtgaatttggtgcacgacaattatggtaaaaaaacatttgcttggtctaaagaagatcattaatgttttgtgaccatacaagttgtaacagtggattgtttttatgtgtaggtattgttaaatacagggactgtttccaggcacagaatatgaatcgtaagttaggatggacattagatgtgattatgatgataaagcgaaggtctgcggtcctrtatctacagacacgtggtgagaaattagaacaaactggagacgggccattgacacatggactctgcctgggcatgttaggttaattctttgactccaagccttaaaatactcacatggagtcagcgctcacctcattcacacaattatcatagagctccctggacactgaacctctaaagggaaaaggtctaccctggagccaggagcatcagggttggcttgggagcatgagaggtgagcccagggctaggcctgggccaggccccggcagcactgctacttgggaggagccacttcacctttgtattagttattaaaaattaatttgggctgggcgcag

SEQ ID NO: 638 - DNA, 3947 bp, Homo sapiens
  misc feature (625): n equals a,t,g, or c
  misc feature (3738): n equals a,t,g, or c
cgcaggcggcgggaggcccaggagaagcggtactactacgacctcgatgactcttacgacgagagcgatgaggaggaggtcagggcccacctccgttgcgtggccgagcagccgcccctcaaactggacacgtcctctgagaagctagagtttttgcaactttttggcttgaccacccaacagcagaaggaggaattggtggcccagaagcggaggaagcggcggaggatgctgcgagagagaagcccgtcgcccccaacaattcagagcaagcggcagacgccttcaccgagactggcgctgtctacccgctacagccctgatgagatgaacaacagtcccaacttcgaagaaaagaagaagttcctgaccatcttcaacctgacccacatcagcgctgagaagaggaaagacaaagagagacttgttgaaatgctccgtgccatgaagcagaaggcactgtcagcagcagtggccgactccttgacaaactctccgagggacagtcctgccgtctccctgagtgaaccagccacgcagcaagcctctctggatgtggagaagccggttggtgttgctgcttccttgtctgacatcccaaaggccgcggacctgggaagctggnaacaggtccggccccaggagctgtcgagagtccaggagctagctcctgccagcggggagaaaggccaggctgagcgaggcccctggaggcaaaaagagtctgagcatgcttcactatatccggggcgctgcacccaaggacattcctgtgccgctgtcccacagcaccaatgggaagagcaagccgtgggagccctttgtggcagaagagtttgcacatcagttccacgagttcagtgctgcagtccacccagaaggccctgcagaagcataaagggagcgtggctgtgctgtctgcagagcagaaccacaaggttgacacgtccgtccactacaacattcctgagctgcagtcctccagccgcgcccctccaccccagcacaatgggcagcaggagccccccactgcaaggaagggccccccaacccaggagttggaccgggactcggaggaggaggaagaggaggatgatgaagatggagaagatgaggaggaagtccccaagcgcaagtggcaagggatcgaggccgtttttgaagcttaccaggaacacatagaagagcaaaatctggagcggcaggtgttacagacacaatgtagacgactggaggcccggcactacagcctcagcctgacggcagagcagctctcccacagcgtggcggagttgaggagccagaaacagaagatggtctcagaacgggagcggctccaggcagaactggaccacttacgaaagtgccttgccttgcctgcaatgcactggcctaggggctacctgaagggatatcccaggtgacggtttcccttgcactaggccgaacctatagtatagaaatattatctattttattaccttgaatatttaatatttttcactgggaggtttgaagcttacaaaatgagaatgtgccatgcatgaagcaaaggattccaggctccagaaaaaatgaatgaactcaccttgacgtcaatgcaattgaatcaccgttgtcattcagcgagcaaccaatgtaggattgcccacagtttttctttttaaaggtggttttcgcccttcctctcccacattatttcttaatctgaacatgaaggctccattagcaacactaaaacttgatcattaacagccccctgtgcatatgagtggatcaaaccggttctgttctttcttgtgttgccatgttactatgcctcaagcccagtttgcttttgccrcagcgatggggccagtctcattcctccccaggagtgaaacttgcttcagctgaaaaggttgggtgcatygtcagtaaaaagggcttatttgtttcattttactttcctgcaaaattttcttcaaagcaacaagtcctaggagcacacaaagcaacccaaaggcttttccctggaaaagctctttcttacctaaagataaaaccaattcacaaactgaaggtagctttttattactccgtggggagcatgtacagagctctgtgtatacacagcttcacacccaccagattgttactacagtgggttgggttttcatacagacgtaaattttgagagaaaagtcaaaggtgcttcagccttgtactgtgtatatatattaaaaaaaaaacaaagttttgtatgtttttattactttaactattgttataaaaagcctgccatttttaatatgtggtttgggggatttttgtttgtttttcctgtttgggggttttgtttgttgttttggttttttttgggcaaaaaaaaaaaaaaaaccttgcttttagtgtttgtactgctgctggtcaggacattaaaatattgaagtgtttttaaaaattaaagaagaagaaaagtaaaagagcttaccactggcgcctatgcgatcacttcatttttagtttgagttgcaccagaagctgccgtagaaagccatgcgctactgcttacctcctccactccccctgcctgcccccagcatctggacaagctaatagcaaatattacccattgctatcaagggaggagggggtagtctgtagaacccatgtgtgacagtcatgtgcacacatgggcgggggcttttaaaaacctttcaggaagtcaatgatttctgtgattgatataattctaaggtgtctgagagcaggtacagaataggaacttcagaggctttgtttaaacgcaaagctttgtaaaagccacaaggtctgagctgaacccctcctttttgaacttactgtgacaagcacaggaacggtcagaaactgggctcatcacaccaaggcaaagcaacgggcgagtcttcctccttgtcctagttactgcctatggaggcagtgtttagatcaagaaggcctctcttgctcccaagggccctcaccagaggccagggctgccagtcactggtctggggggtggaggcctgagctgagggcagggtgcctgacctgtgtgccggctgctcactgctgtgaccagcagccgagcccttggccctagcccttgctgcgcakaacagcttgctggcagctggcatcgtgtcgctttatctgcccccgcacagtttgctttgtacgtctgccaagaatcttccagttattagcaaactcagacgaatgtaccgccagtattatcagcagtcaacaagcaccttcctctccacagaagcagctggaagagaactcgaggggctgtgctgmaggcctyccctcgaaagacactgggaggtcagcatgttccacaggtgttcagagggagtctgctacaaactatcagggcaaaatctcactggawttctccactgaaaacctacttgaggtttctggtctgaaggcttaagagtcacatcttagcacttccgctctcaggcctcctcctccatcacagatgtctggatgcttttggaaatggccttggctaaagtaaaagggaaaagtagatccgataacttaaaaacgtagctcatcccttaccatccaaggggcactcccttggttggattttctatgacagcacaggggacaggtggcacaccatgagaggtctgcccagggtgggagcagtgtcactgtgctagcaatagttggcttctcccctgtcagtggaaaccccacttctgcccggcccttgangcttcttgcccactgtctccccatccttccacctacttgtggcgatctgagtactctactcttgctcaagaagtaatacgacaatcagaatacaaaccagtaaggcaacacgaataaactaagaaaaaggtaagaactgtctcaaaaacgaaaccacacccacccaagaacagggtttaaaaaaaaaaaaaaaaaaaaaaaaaaaaaaa

SEQ ID NO: 639 - DNA, 1427 bp, Homo sapiens
  misc feature (6): n equals a,t,g, or c
  misc feature (9): n equals a,t,g, or c
  misc feature (12): n equals a,t,g, or c
  misc feature (29): n equals a,t,g, or c
caagcnganacnaccctcactaaagggancaaaagctggagctccaccgcggtggcggccgctctagaactagtggatcccccgggctgcaggaattcggcacgagggcggcggaactagccaggcctctgccggggcagcgactggcgctactggggccagcrggggcggtggccccatcaacccggcctcgctgcctcccggcgacccgcagctcatcgctctcatcgtggagcagctcaagagccggggcctttttgacagcttccgccgggactgcctggccgacgtggacaccaagccagcttaccaaaacctgaggcagaaagtggataattttgtgtcaacacatctggacaagcaggaatggaatcctacgatgaacaaaaaccagttgcgaaatggtctgaggcagagtgtggttcagtcagggatgttggaagctggagtagacaggattatttctcaggtggtggatccaaaacttaaccacatcttcaggccacaaatagaacgagcaattcatgagttcctggcggcccagaaaaaagcagctgtgccagcaccccctccagagcccgaagccaggaccctccagctccatctcaggacacttcctaagaatacgccagacaccttttgaaagctaatttttggtgaagaaatggattcggttacataagagtgcaacttcagactgaagataggccaaggtcgtcactgatctcaagatttcaaccttgaccatgggcagtgaccagattgaaaggggagcaagttcggcagtgggagagttgaccgtgtcaccccctgcattgtgctgccatttggccagcctgtccaagggcatgacaccaagtagacactacagagagagaaacactacagcaacccagggttgtcctgaaacagacttttatacttgaacatggagactgcacatggactttagggtttgtgctgtgggataaacggaagctacagtgagaacatagccagtcccaaagacaatttcaaagaaaaatgacagtaaagattagctgggagtagtctttgacagtgcttatttgatactgtctctcagagtttgcaaaccagattgtacaagtcattagcgtcagatagctttaaagttgtgaccttcttgtacatgaatcttctagccagtttcctttcctttgtaacgaaacatgaaatcctagaatgtatgagaagttcagacattaggcataaggaaactcgtttgcaggctctctgtccagggctgcttcctgtcctggaggggccagtgagtcttaggtatgtttattttattctcacatttgtgtttttttagaaaagtgaatggtcaataaatggcttatctttcataataaaattatttgatacttttaaaaaaaaaaaaaaaaaaaaaaaaaaaaaaaaaa

SEQ ID NO: 640 - DNA, 920 bp, Homo sapiens
  misc feature (910): n equals a,t,g, or c
  misc feature (919): n equals a,t,g, or c
gcccacgcgtccgcccacgcgtccgcccacgcgtccggttcctgcttcggagtcggcggtggtcgtccagaccgagtgttctttactttttgtttggttgaggtttcacgctagaaggtggctcaggatgtcttcatcacattttgccagtcgacacaggaaggatataagtactgaaatgattagaactaaaattgctcataggaaatcactgtctcagaaagaaaatagacataaggaatacgaacgaaatagacactttggtttgaaagatgtaaacattccaaccttggaaggtagaattcttgttgaattagatgagacatctcaagggcttgttccagaaaagaccaatgttaagccaagggcaatgaaaactattctaggtgatcaacgaaaacagatgctccaaaaatacaaagaagaaaagcaacttcaaaaattgaaagagcagagagagaaagctaaacgaggaatatttaaagtgggtcgktatagacctgatatgccttgktttcttttatcaaaccagaatgctgtgaaagctgagccaaaaaaggctattccatcttctgtmcggattacaaggtcaaaggccaaagaccaaatggagcagactaagattgataacgagagtgatgttcgagcaatccgacctggtccaagacaaacttctgaaaagaaagtgtcagacaaagagaaaaaagttktgcagcctgtaatgcccacgtcgttgagaatgactcgatcagctactcaagcagcaaagcaggttcccagaacagtctcatctaccacagcaagaaagccagtcacaagagctgctaatgaaaacggaaccagaaggaaaggtgccaagtaaaggaagacactgccaaaaatgtagaaacaaaacccgacagggtatttnttgtaaagnc

SEQ ID NO: 641 - DNA, 1706 bp, Homo sapiens
  misc feature (1704): n equals a,t,g, or c
gccgcgcctccgccgctttttatagcggccgcgggcggcggcggcagcggttggaggttgtaggaccggcgaggaataggaatcatggcggctgcgctgttcgtgctgctgggattcgcgctgctgggcacccacggagcctccggggctgccggcacagtcttcactaccgtagaagaccttggctccaagatactcctcacctgctccttgaatgacagcgccacagaggtcacagggcaccgctggctgaaggggggcgtggtgctgaaggaggacgcgctgcccggccagaaaacggagttcaaggtggactccgacgaccagtggggagagtactcctgcgtcttcctccccgagcccatgggcacggccaacatccagctccacgggcctcccagagtgaaggctgtgaagtcgtcagaacacatcaacgagggggagacggccatgctggtctgcaagtcagagtccgtgccacctgtcactgactgggcctggtacaagatcactgactctgaggacaaggccctcatgaacggctccgagagcaggttcttcgtgagttcctcgcagggccggtcagagctacacattgagaacctgaacatggaggccgaccccggccagtaccggtgcaacggcaccagctccaagggctccgaccaggccatcatcacgctccgcgtgcgcagccacctggccgccctctggcccttcctgggcatcgtggctgaggtgctggtgctggtcaccatcatcttcatctacgagaagcgccggaagcccgaggacgtcctggatgatgacgacgccggctctgcacccctgaagagcagcgggcagcaccagaatgacaaaggcaagaacgtccgccagaggaactcttcctgaggcaggtggcccgaggacgctccctgctccrcgtctgcgccgccgccggagtccactcccagtgcttgcaagattccaagttctcacctcttaaagaaaacccaccccgtagattcccatcatacacttccttcttttttaaaaaagttgggttttctccattcaggattctgttccttaggwttttttccttctgaagtgtttcacgagagcccgggagctgctgccctgcggccccgtctgtggctttcagcctctgggtctgagtcatggccgggtgggcggcacagccttctccactggccggagtcagtgccaggtccttgccctttgtggaaagtcacaggtcacacgaggggccccgtgtcctgcctgtctgaagccaatgctgtctggttgcgccatttttgtgcttttatgtttaattttatgagggccacgggtctgtgttcgactcagcctcagggacgactctgacctcttggccacagaggactcacttgcccacaccgagggcgaccccgtcacagcctcaagtcactcccaagccccctccttgtctgtgcatccgggggcagctctggagggggtttgctggggaactggcgccatcgccgggactccagaaccgcagaagcctccccagctcacccctggaggacggccggctctctatagcaccagggctcacgtgggaacccccctcccacccaccgccacaataaagatcgcccccacctccaccctcaaaaaaaaaaaaaaaaaaaaaaaaaaaaaaaaaaaaaaaaaaaaaaaaaaaaamgggggggncc

SEQ ID NO: 642 - DNA, 2170 bp, Homo sapiens
  misc feature (406): n equals a,t,g, or c
  misc feature (811): n equals a,t,g, or c
  misc feature (2150): n equals a,t,g, or c
  misc feature (2154): n equals a,t,g, or c
  misc feature (2155): n equals a,t,g, or c
  misc feature (2170): n equals a,t,g, or c
actatctcattcccaggccgagrcctggacaagtttattaaattttttgccctcaagactgtccaagtgattgtccaggctcggcttggtgaaaagatttgcactcgttcatcatcttctccaacgggttcagattggttcaacttagcaatcaaagacatcccagaggttacacatgaagcaaagaaggcactggcaggacagctgcctgcagtcgggaggtccatgtgtgtggagatttcacttaagacttctgagggagattccatggagctggaaatatggtgtcttgaaatgaatgaaaagtgtgataaagaaatcaaagtttcctacacggtgtacaacagactgtcattgctgctgaagtcccttcttgctataactagggtgacaccagcctataggntctccaggaaacaagggcatgaatatgtcatattatacaggatatattttggagaagttcagctgagtggcttaggagaaggcttccagacagttcgtgttgggacagtgggcacccctgtgggcaccatcactctttcttgtgcttacagaattaacttggcattcatgtctaccaggcaatttgagaggaccccacctatcatggggattattattgatcactttgtggaccgtccctatcccagctcctctcccatgcacccctgcaattacagaactgctggtgaggacactggagtaatatacccgtctgtagaagactctcaagaagtgtgtaccacctctttttccacctccccaccatcccagctgatggttcctgggaaggaaggtggggtacccnttgctcccaaccagcctgtccatggtacccaggctgaccaggagagactggcaacctgcaccccttctgacagaacccactgtgctgccacaccctccagtagtgaggatactgaaaccgtatcaaacagcagtgagggacgggcctcccctcacgatgtcttggagaccatctttgtccgaaaagtgggggcttttgtcaacaaacccattaaccaggtgaccctgacgagtttggatataccctttgccatgtttgctcccaagaatttggagctggaggataccgatccaatggtgaatcctccagattccccagagactgaatctcctctccagggcagcctgcactcagatggctccagcgggggcagcagtggcaatacccatgatgactttgttatgatagactttaaaccagctttttctaaagatgacattcttccgatggacctggggaccttctatcgggagtttcagaacccacctcagctgagcagcctctccatagatattggagcacagtccatggctgaagacttggactcattaccagagaagctggctgtgcatgagaagaatgtccgcgagtttgatgcctttgtggaaaccctgcagtaaaagtatccttgagtcccagcagcaccccctttttgtggccccagggcataagcagcctcccatgcatcagctgctcccacccctcatcctgctctgagccaggtggaagggaggctggcttctcccatggggacccagaagtccctactcttggacctcctggagactccgtggcggcagtcaagcccagtgcccagttggagaagactcacgtgctggccttggagatgggaagaaccttcgtacgaaaaagccctcagcagggccatctgtgtgccctgcccatcaccaactgcttcccaagggtgtcatcctgttcctcctgctgccggcctcctgcctgggcctgccttgcagctggccccttccctgcctgctgtcaccatccactgtttgacattccagctggtggccaagagattggtgtggaggcagaaagaggaaggagacagtgccaggaggaagaaggaaggagtcccttagctctcttcattgtcccctttacttcctgctatcttcttctcctcttcttctctctcttgcctctatgcctgtatttctggcaatatgacaggcctgcctacccaagatcagaactccaaaaccactcccacccctgaaggtcgggagggtctgagcagccctggtggctgcctgtgctcaggtcctcagctccatgggaaataaaaatggcaccctgaaaaaaaaaaaaaaaaaancccnnggggggggccccggn

SEQ ID NO: 643 - DNA, 1712 bp, Homo sapiens
  misc feature (8): n equals a,t,g, or c
  misc feature (1664): n equals a,t,g, or c
taagggancaaaagctggtgctccaccgcggtggcggccgctctagaactagtggatcccccgggctgcaggaattcggcacgagtcttggcggtggtggcarcagtgttgaaactkgggaacattgagttcaagcccgaatctcgagtgaatggtctagatgaaagcaaaatcaaagataaaaatgagttaaaagaaatttgtgaattgaccggcattgatcaatcagttctagaacgagcattcagtttccgaacagttgaggccaaacaggagaaagtttcaactacactgaatgtggctcaggcttattatgcccgtgatgctctggctaaaaacctctacagcaggttgttttcatggttggtaaatcgaatcaatgaaagcattaaggcacaaacaaaagtgagaaagaaggtcatgggtgttctggacatttatggctttgagattttcgaggacaacagctttgagcagttcattattaattattgtaacgaaaagctgcaacaaatcttcattgaacttactcttaaagaagagcaggaggagtatatacgggaggwtatagaatggactcacattgactacttcaataatgctatcatttgtgacctaatagaaaataacacaaatggaatcctggccatgctggatgaagagtgcctcagacctggcacagtcactgatgagaccttcttagaaaagctgaaccaagtatgtgccacccaccagcattttgaaagcaggatgagcaagtgctctcggttcctcaatgacacgtctctgcctcacagctgcttcaggatccagcattatgctggaaaggtgctgtaccaggtggaaggattcgttgacaaaaacaatgaccttmtctatcgagacctgtcccaagccatgtggaaggccagccatgccctcatcaagtctttgttccccgaagggaatcccgccaagatcaacctgaaaaggcctcctacagcaggctcacagttcaaggcatccgtggccactctgatgaaaaacctacagaccawgaamccaaactatattaggtgtatcaaaccgaatgataaaaaagcagcacacatcttcaacgaggctctagtgtgtcatcagatcaggtacctggggcttttggagaacgtccgagtgcggagggcaggctacgccttcaggcaggcctatgaaccttgcctagaaagatacaaaatgctttgtaaacaaacatggcctcattggaaaggaccagccaggtctggtgtggaggtcctatttaatgaattagaaattcccgtggaagaatactcctttggtagatcaaagatattcatccgaaacccaagaacattattcaaattagaagacctgaggaagcaacgcctggaggacttggccactctcattcagaagatatatcgggggtggaaatgccgcacacacttcctgctaatgaaaaaaagccaaattgtgattgccgcctggtacaggagatatgcgcaacaaaagaggtaccagcagacaaagagttccgccttagtaattcagtcttatatccggggttggaaggctcgaaaaattctgcgggaactgaagcatcaaaagcgctgtaaggaagcagtcacgaccattgctgcatattggcatgggacccargywcswangaagaatcaggaaattcttcagagccaatgctggaaaagaaaatctat

SEQ ID NO: 644 - DNA, 1793 bp, Homo sapiens
  misc feature (790): n equals a,t,g, or c
  misc feature (1731): n equals a,t,g, or c
  misc feature (1793): n equals a,t,g, or c
ccgggtcgacccacgcgtccggattcttggcgccggagaagaggcagggtcaccctctctccacgtcagagacctgactgtggagatggcggctcagaagataaacgaggggctggaacacctcgccaaagcagagaaatacctgaaaactggttttttaaaatggaagccagattatgacagtgccgcttctgaatatggaaaagcagctgttgcttttaaaaatgccaaacagtttgagcaagcaaaagatgcctgcctgagggaagctgttgcccatgaaaataatagggctctttttcatgctgccaaagcttatgagcaagctggaatgatgttgaaggagatgcagaaactaccagaggccgttcagctaattgagaaggccagcatgatgtatctagaaaacggcaccccagacacagcagccatggctttggagcgagctggaaagcttatagaaaatgttgatccagagaaggctgtacagttatatcaacagacagctaatgtgtttgaaaatgaagaacgcttacgacaggcagttgaattactaggaaaagcctccagactactagtacgaggacgtaggtttgatgaggcggcactctctattcagaaagaaaaaaatatttataaggaaattgagaattatccaacttgttataagaaaacaattgctcaagtcttagttcatctacacagaaatgactatgtagctgcagaaagatgtgtccgggagagctatagcatccctgggttcaatggcagtgaagactgtgctgccctnggaacagcttcttgaaggttatgaccagcaagaccaagatcaggtgtcagatgtctgcaactcaccgcttttcaagtacatggacaatgattatgctaagctgggcctgagtttggtggttccaggagggggaatcaagaagaaatcacctgcaacaccacagscaagcctgatggtgtcactgccacggctgctgatgaagaggaagatgaatactcaggaggactatgctagtattttgcttgctgaaaagaaaagggaaacaaaggtaaaatcctgacatgccatttcaaggacttgggaatagattagggatatccgtacttcattacagtcatgattttggatcctaataaagactrgtttttagttaccatcttcccaaatcactcattgtatccattacctgtgaagcatatctttttcyttccataagagcttttctaagacaccagcaggaattaacagaaaatgtactgtcatgttttaatacattgattaaaaaatttgcaagccaaattatacataaattatgttctaaacaaaaggggtaataagcataggtattctctcttggacacttgtaagttactgttagtgaattgttttttacgtttcatttaataattgctgctaaaggtgatgtttactgataaatcattttaaaatttttttgttttgaaaagtaaatttatcccccatgatgttagatacatttaaattattaagtcttttcagagatgagatggggacaggaagttattttgagccttacaatattatttagcccaataaaagatgcattgaagctcttatatattatgagtttgaaaaattttgaaggtagcatattgaagtgatctataaatatcttcagtcctctctgaagtgtgggtatttcttctatctaaaaaatacatacagtgactgtcttcaaatcnacttggttcttgaccaaataggagctaatgggtaatgaatacctttttgtttgtgtgtttgn

SEQ ID NO: 645 - DNA, 2679 bp, Homo sapiens
  misc feature (3): n equals a,t,g, or c
  misc feature (21): n equals a,t,g, or c
  misc feature (24): n equals a,t,g, or c
  misc feature (41): n equals a,t,g, or c
  misc feature (124): n equals a,t,g, or c
  misc feature (128): n equals a,t,g, or c
ccnaccagtttgcagtggtgnacnagaaccagtttgtaagnatttatgaccagagaaaatgatgagaatgagaacaatggagtactcaagaagttctgtcctcatcaccctggtgaacagtgantccnaaascaaacatcacctgtcttgtgtaacarcccacgacggcacagagctccctggcccagttacaatgatgaagacatttacctcttcaactcctctcacagtgatggggcccagtatgttaagagatacaagggccacagaaataatgccacagtaaaaggcgtcaatttctatggccccaagagtgagtttgtggtgagcggtagtgactgtgggcacatcttcctctgggagaaatcatcctgccagattattcagttcatggagggggacaagggaggcgtggtaaactgtcttgagccccaccctcacctgcctgtgctggcaaccagtggcctagaccatgatgtgaagatctgggcacccacagctgaagcttccactgagctgacagggttaaaagatgtgattaagaagaacaagcgggagcgkgatgaagatagcttgcaccaaactgacctgtttgatagtcacatgctgtggttccttatgcatcacctgagacagagacgccatcaccggcgctggcgagaacctggggttggggccacagacgcggactctgatgagtctcccagctcctcagacacatcggacgaggaggagggccctgaccgggtgcagtgcatgccatcttgaggcctcatacctaggtggggcaggctggggctgccaacctgatcctgcctgggcaaccctttcctgtcccaggccctacattcagcagaaacgcactttggactttttgctttagataaaagaaagacatcccaggagaaggacaaaccagaggagtgaaccaacaaagagtacctaggaatgggagttgagccctggaatggggctccatggagaggtgcataggactcggcagaaatggcctctccccaaagcctctttttgagaggagagggaagcctattttgttaactggtttgggatagggaatggggtttctttttctttaatctcccttgtttcttgggctgggggargggtggggggaacaactggctattcagtaccaaggggccagagtggagggtaggagtgccactctctctttggtttaggtttttgaccttttcttcctttgttttttaaaagtttatgacagttggctccccccccacccccagcaaccccatcccagaatcctattttcctgggaagtccttaaagcccctaaccatcccacactcttcactttcctttccaccttattcattctctgtacttaccacagtattttgcacttgattacatatccttcactctcttctcttcatcccatcaccccctaaataggtcaggtgagggaggctgggaagaggtgggaggaggggcagaagtgaaggaagaataggaaggatattacctcttctgttatttttttaagaaacattgtttggtggcagcaatctccctgtccctatcactgttagaggcctaattttatatctataaatatattaaaaagcaagtcaaacttggatgtatcaaggtaaaattattgtcaaagtttaaatacctatatattctctgaatgcaataaagggacttaagagtgaacaagagtaatggtgtggaagtgacacctggggtcagtttacctctgtgtatggtcactagagattgggacttaccctttaggttttaggaggcttgagaatggaaggatcctcatttctgcccttcctggttccctgctttggtgtaggggttgggaaaaacaggaaattcctctcagctctgcctcagatctcctacctctccttaagtcttgtagggggttccaaggatggctcttctaaccagaggctggcctgtctttaaaacttaactactttagggtggtgccaccactgcagactattgtggtactttgtgacagaagacatgtacacacacaccacacacatacatacacactctctcactctgtctctcttacctttagctgcttgatcattaagccatccaacttcatgccagttcccttctttatagaagagtgaagggaaagacttcctgggtttgacttaaaccttgtccacctcttgatattttaggattgaggaataagtcattaatctaaggactgattacagtggctggagcttgggcacttgtcttatcactggtcactgagtctgaaagtcccagctgaattcttgcccttaagtgcttttgctgctatttttttgcccccagttccacaagatccaaccaagaattctgtatcctgggacagtcagattcttctaaatcaggccaggaaggaggggaaaagagtgagagaatggtattcccagatacttcttcctcctgccccttttcccagcagctctgagaccagatgttggctgctgtacttactccctgaggtagggaatgtgtggtgatcgagtggtctgtgttcctattgctggtggggtgatagggtgggctaaaaaccatgcactctggaatttgttgtattttctcccagtaaagcttttcttctcccgamaaaaaaaaaaaaaaaaaaaaaaaaaaaaaaaaaaaaaa

SEQ ID NO: 646 - DNA, 832 bp, Homo sapiens
ggcaactcattgctctccatgtaaatgtaatcaacagatgaagagaatataattgctctgcttttccactaaaactccatcttagtgaattttaaattatccagagatgtcaaactgccaaataaaaatatttcagtagtctttgcatcagcttaccttgtaccagaaacatttccaatttactatcaaattatagtaactgagcctgtgtgaagtatctcatcattttcgaaaggaacaccttgtgtgatgccagtgagcatttctaaaaagggtgtgaggtagaggtaaggtgagagaccatttcagaatgcactgttgctcaaaaaggtgatctggttctttcttcagagatttctacggggatagaaaatcgggagtctgccctcattaatctgtgactccacctcttgcatcaaatcaatatctatttgttgagcacttattgattaagaccttgcatatgtctgtccattttgatttgagatacaactttttgtgtgggttgaatgacaaatcactccaaacaaarctgggcacagagaatcagctaggagaccagttattcagggtccatttctcttggatgtaaaggagtcctgggtaaaatgtggctgtaacctaaaccaactagtccttgtgatttgtttctgccctctgtgtttcctgttgtcaaatgctaagtgtgtgttttgcagtcatgaactaaagcacaaaaagatgcatgagacattgtagtcatatgtctggtgtgacactttggagcaaaaaccttgcagtggtaaataaaaaatttccaacagggaaaaaaaaaaaaaaaaaaaaaaaaaaa

SEQ ID NO: 647 - DNA, 1325 bp, Homo sapiens
gcagcgggacgcaccatttcagttgtgttcttggttcatttcgtgtctcggcgatgtttcctagagtctcgacgttcctacctcttcgccccctttcccgccaccctttgtcctctggaagcccggagacatcagcggctgcgattatgctactcactgttcggcacggaacagtcaggtaccgcagttcagcgctgttggcccggacaaaaaataacatccaaagatattttggcactaacagtgtgatctgtagcaagaaagataagcagtctgttcgaactgaggagacttccaaggagacttcagagagccaagacagtgaaaaggaaaatacgaaaaaagacttgttaggcattattaagggcatgaaagttgaattaagcacagtaaatgtacgaacaacaaagccccccaaaagaagaccacttaaaagtttggaagctacacttggcaggcttcgaagagctacagaatatgctccaaagaagagaattgagcccctgagtcctgagttggtggcagctgcatctgctgtggcagattctctcccttttgataagcaaacaaccaagtcagagctgctgagccagctccagcagcatgaggaagagtcaagggcacagagagatgcaaagcgacctaaaattagtttcagtaacataatatcagatatgaaagttgccagatctgctacagctagagttcgttcaagaccagagcttcggattcagtttgatgaaggctatgacaattatcctggccaggagaagacggatgatcttaaaaaaaggaaaaatatattcacagggaaaagacttaatatttttgacatgatggcagttactaaagaagcacctgaaacagacacatcaccttcactttggratgtggaatttgctaagcagttagccacagtaaatgaacaaccccttcagaatggatttgaagagctgatccagtggacaaaagaggggaaactatgggagttcccaattaacaatgaagcaggttttgatgatgatggttcagaatttcatgaacatatatttctggagaaacacctggagagctttccaaaacaaggaccaattcgccacttcatggagctggtgacttgtggcctttccaaaaacccatatcttagtgttaaacagaaggttgaacacatagagtggtttagaaattattttaatgaaaaaaaggatattctaaaagaaagtaacatacagttcaattaagaccatggaaatttttatttcaaacaattagagatggatattacaactaaataaaataattttactagaaaaaaaaaaaaaaaa

SEQ ID NO: 648 - DNA, 606 bp, Homo sapiens
  misc feature (572): n equals a,t,g, or c
ttgcagctatacaaaatatttaaaatctcaagtattcaccctagatagagttattatctaagcattttatcttatccatctcaaaaagaaaagaaaagaagactctgacctgtactcttgaatacaagtttctgataccactgcactgtctgagaatttccaaaactttaatgaactaactgacagcttcatgaaactgtccaccaagatcaagcagagaaaataattaatttcatgggactaaatgaactaatgaggataatattttcataattttttatttgaaattttgctgattctttaaatgtcttgtttcccagatttcaggaaactttttttcttttaagctatccacagcttacagcaatttgataaaatatacttttgtgaacaaaaattgagacatttacattttctccctatgtggtcgctccagacttgggaaactattcatgaatatttatattgtatggtaatatagttattgcacaagttcaataaaaatctgctctttgtatracagaawamaaaaacattggktatattaccaaaacttttgactagaatgtcgnatttgaggatataaacccataggtaataaacccc

SEQ ID NO: 649 - DNA, 1696 bp, Homo sapiens
  misc feature (1047): n equals a,t,g, or c
gggagaactgagggtcctccttcccaacacacacacgcacacgccttctcctaccacagcaagtgaagaatctcacttcttctctcctggcttccacagaggatgaaaccaggcattccttggcctaaggagaagagggagagggatgtgagagtagtgggtgggtggggaggccagggcttgggaaataagtgggagagacccagcatgccctgcggccactgtgcaagcagcacccagtgcccccttcctcccccaggcccagcgaggagatggtgaagatggtgctgagccggccctgccatcctgacgaccagttcaccaccagcatcctgcggcactggtgcatgaaacatgacgagctgctggccgagcacatcaagtccctgctcatcaagaacaacagcctgcctcgcaagagacagagcctgaggagctctagcagcaagctggcccagctgactctggagcagatcctggagcacttggacaatctgcggctcaacctgaccaacaccaagcagaacttttttagccagacgccaattctccaggcgctgcagcatgtccaagcgagctgtgacgaagcccacaagatgaaattcagtgatctcttctccctggcggaggaatatgaggactcttccaccaagccacccaagagccggcgaaaagcagctctgtccagccctcgaagtcgaaagaatgccacacagccccccaatgccgaagaagagtcgggctccagcagtgcttcagaagaggaagacacgaaaccgaagcctaccaagcggaaacgaaaagggtcctctgcagtgggctctgacagtgactgaggccctgcattccccatcccacccccggctggactgccctctccttcttggtgattcaaaggttaatagaggctgaggagattgcaggggaaacacccttgctgcatccccaagctcccccggtggaaggaggagctttctcctctggctgagtttgagaagctgccatgcagcccctagccccttccctcctcctggggcctccagcccntcacactgctgttcccagtgatatttgggatctgactgaagccagaggctctgtaaaatcagaccatagtggaagtcctcagccccctggccccttccgcaatctcctcccccagtctcccaaagagccatttcaacagagaagggaaatgacaaaggggcagctggccagataagctaggatgagagcagagactcagtgtgtgggtgtcccttcctgcttccccttcaggtcttggtttgttctgaagggacgttttatagtcactatccacatgccagtgtgaaatgggcatctatgacgtggtcagggtgtccattcctaatcatggggcagatgccacaagcattcagaaaggagtctgaaagggtggccacagccccacgtggtgtgccctggaggcttaggttggtctgaggttggcacctcaatctacaccagagcccagggagtcccagaggcaagtttcacagaattgtcaaatgatcccatttccttgagkctgtttttttttttgtttttttttgttttttttttggcagagataatcgtgtcttaaaagttgtttttaaatgacaataaaacaagccagaatgtcaaaaaaaaaaaaaaaaaaaaaaaaaaaaaaaaaaaaaaaaaaaaaaaaaaa

SEQ ID NO: 650 - DNA, 3059 bp, Homo sapiens
atttcaaagagaatcccaacctcagagataactggaccgatgcagaaggctattatcgtgtgaacataggtgaagtcctagataaacgttacaatgtgtatggctacactgggcaaggtgtattcagtaatgttgtacgagccagagataatgcaagagccaaccaagaagtggctgtaaagatcatcagaaacaatgagctcatgcaaaagactggtttaaaagaattagagttcttgaaaaaacttaatgatgctgatcctgatgacaaatttcattgtctgagactcttcaggcacttctatcacaagcagcatctttgtctggtattcgagcctctcagcatgaacttacgagaggtgttaaaaaaatatggtaaagatgttggtcttcatattaaagctgtaagatcctatagtcagcagttgttcctggcattgaaactccttaaaagatgcatatcctacatgcagatatcaagccagacaatatcctggttaatgaatccaaaactattttaaagctttgcrattttgggtcggcttcacatgttgcggataatgacataacaccttatcttgtcagtagattttatcgtgctcctgaaatcattataggtaaaagctatgactatggtatagatatgtggtctgtaggttgcaccttatacgaactctatactggaaaaattttattccctggcaaaaccaataaccatatgctgaagcttgcaatggatctcaaaggaaagatgccaaataagatgattcgaaaaggtgtgttcaaagatcagcattttgatcaaaatctcaacttcatgtacatagaagttgataaagtaacagagagggagaaagttactgttatgagcaccattaatccaactaaggacctgttggctgacttgattgggtgccagagacttcctgaagaccaacgtaagaaagtacaccagctaaaggacttgttggaccagattctgatgttggacccagctaaacgaattagcatcaaccaggccctacagcacgccttcatccaggaaaaaatttaaacaagatgaagaaactccaagggtttgagtaaatacaaagactgaagaaatttcacagcagtttattaatgtatataaacttataaatatttctccagcaaatttgaggaagcatgatatatttgaattaacaccaagggtgatatttcttttagagatgttagttaatctgttttgtgtcttacgtgaaatttcactgtagactgttttaaattgccaagactgcacaaaattacagtgctaatgtatatggttgcagttcacataaagacaaaagcatctgttatgaaatgagtagtaatattgggtggttgatttgttcttagcagacttggcttcattttggtcttgagataaaatggccagcataaatgctgtttatattcacgttttcctaggtgtgtgtgtgcaggccacagcagcatgcccttggtgtagtcagtgccgaaaggggtctgttccttcttgagcctgcctgcagggatggtctccttttaaagcaggttgtgtgcagcattcagtacactgaaggtaagctaaaccatcaacatctctggtgttttaagatgttattttattggaacaactgacaaatgagggatgttagctttgtggcagaattccctgcatgtgtgataactgatcttgttttattttttggcattgcaactgtggcatagttacaatttctgtttgttcatcacatttaaaattggaagagaacgcgcttgatggatagagcgccttcagtgtactgtttcttattaactttactttttttaaatcaacttgctatagactttatatacattttgttaaatatagttcctagtgacatagaaacgatgcgtagttttcatttactaattacaaatgttgaggcctaattctgaaagtcctcatatttaaaggctagacaacgtaatgaaatttttaactatttgtatgtcattttgaaagtgtactgctttatggtaaaagtgtttttcatttgttcattgttttcattatttgtgatcatgttgtctttcaatacaggcataaaccttccactcttgaacaaagcagctgctttttaaaagcggtaattgcttctttaccttttatttcttttgtaaatgaagcttttctttaagaatgtgactttaaagtgttgtctattgcataaaacagttgacactcacttattgtaaagtgaagattgttctactgcatgtgaagtggaccatgcagatttctgtatgttctcagtatgcatcactagataataaagtcttttgtgaacaaggcatttgtagccatttttaaaagtttttgtcttcagtgctggtaagtcaggtaaaccataaatagttaaaagcaaccttttgtttttttcctgaaagtttttaattgaaagtattattagttaaagatgtaaacctagccaaaattaccagtttattaataattaggatcctaattatttcaaaaaatcctacaaatattgtcagctttcagtgtagtgagattattcctgtaggttatggggtataattcaggatttaactaatgtttctgctattttctcacttttccttttgatggtgcggaaagagaaaaaggaaaacggggcacaggccattcgacgccttctccaaggggtctgatttgctgagacaccagcttcaccttcttaacaaggcacctaattacaacaagcatgcacattttggtgcattcaagaatggaaaatcagaatagcagcattgattcttctggtgcagctcagtggaagatgatgacaaccagaagacatgagctaagggtaagggactgttctgaagaacctttccatttagtgatcaagatatggaagctgatttctgaaaatgctcagtgtgtactctaattatttatggtaccatttgaattgtaacttgcattttagcagtgcatgtttctaattgacttactgggaaactgaataaaatatgcctcttattatcaaaaaaaaaaaaaaagg

SEQ ID NO: 651 - DNA, 1366 bp, Homo sapiens
ggccaggcgaaccggctcccgagcagggtcctgaagatgctgagcgctcacaccggtcacctcctgcaacctccactactgcttgaccctgccgggattccccacccagcccttccccaccggactgtgtatttatttactataatgttagcttacaagctgggaatataagtgcattaacggcccacatgagtcaatggtatgcaaaaagtctgtgttctcccaaataataatattaatcccacaaataacgacatgatccccgcccctgttcctttctgttattttttcttagatataagttttacatttttwattccttttcctctttttttggttttgattggtttggtttgagggagagttggggtctttgggttcttctagacgttttgttttcccttcctggggagtttcttgcatgagtcttaacttaaaactacgtttccgccttctctttttccctcttcccccttcattccctcttgtttccttccatttgcggttctgtttttgttttttgttttgttttgttttgttttttcctttgttgtacaagtaacagagaggaggttttttttgtaactcattttgggggtggagggggccacctgggtssaggggccctggagctctattgacctggtacactgctccgggactcctcccccgccaccctccgcgcatagggtccttggtctggaccctgccccccaaaagtagggccttgctcctctaccttgctctgagcacggagagccctgaccccaccagtaggctcgccccyagaagggcccaagtggccgtctaccgtcaccttccagactcccgcccctaacacccagtggctacagtgcgcctgtcggggcacctggagcgctcacctggttgaattcaaagtcccagaaggccccgctggcgtgaagccggccccttacattttgcgaagtgcattatagtccttgtttttctctccctcgtgggggcaacgacccctcccctggcagtaggggtggggtaggtgactctcgctagatccctccaaagcagaccggtggcgatgtcagcggatgtcacgagctcgttagctgcgttcggggaaggttggggcgtcagggagctctcggatcacagcagcccccgccctctcctaggcctggcccgcagagcccccagagtggaccccccagcgactggggtcttctccccactcctccctccttctggtctgatgcggcagcgcgggggctgcggggcctgtttgggacgaacagagctctcccttggtaagacttattttgttaataaatggaatacttggctatattcaaaaaaaaaaaaaaaaaaaaaaaaaaaaaaaagtcga

SEQ ID NO: 652 - DNA, 1425 bp, Homo sapiens
aacgaggtaaaaacaaaaaccacgaaagcacacacaaaataaatcagtgggatttggtaatgtgttttagagtaagaaatttcaggttgttggtgactatcccaacagtcatgttttaaatgtacagtttggggcaagtcatgtaaatactgttggtggtcttccccacacgccccaattttcaggtagtactaagagtatgtgccaggaaactcttgctattgaattgagatgattaaaatggtgacttaatccgtagttattttgcacccactgaaaggaaagtgctttccagaataatatgaagtatctaaaagtgtcaccttttcttgcctgatcaacaatttgggcttcctgtttgtacaaggggccatttggcatacctttcacagcttttatcaggccaagttaaaggctgactacattttttcatcatgaggaaagcagttgaaatgaggcatgagttactgtgcattgggattttagaacaattttcttgtgacagctctttttgtgaagttaggttcttaaaagtgcccatgatggtcacttaaaatgtgcagtaatagcactgccaggatcaagcatgaaaggcttttaaattagatcatcccacagacaatacgtttgataatagttttttcttttaacctctttaagtattgattctgcttgagaatattgaagtacttgccagaagttgtggatttcagttttaacaaatgctattaaagtggagaagcacactctggtcttggaattccatttgaggatttagaagtgtcatgtttataactattcagttgtgtttgttgctggcttgttgtaaagcaataaaatttttttggtctttttgtaagtgagtgtgctgctgtaagaaatctcccatgtgcataacaaattctgaatattttttgaggctaaagaagaccggggtgacaagcagatactgctgtgtaatggttacactaaccaaaagacaccagccactcagagttctatactgtaaagcgcagataacatttgtgtgttataccttgattggggaattaaaagtcatttaactgaagatgttgagaaacctgggctctggttttagtataccggrattacytttttccaattttagraaatcmagcmggktagrgraaatagagatgaattaggggacactgtcttatggattcatttataagaagagaaccagccatatacacttggggagatttgccacatcttaaacttgaataatagtatgagtaatgcttaagggagtttaatagagaaggaaagctttggcagtgttttgagaacttaagtggctaaaragatgagacaaacatgcaggtcgctactggcatagtttcataattgtgkactcggaaattaaagtttgcttgtttcttggtctggaaaaaaaaaaaa

SEQ ID NO: 653 - DNA, 614 bp, Homo sapiens
aagaggtatttttcatcaattctccccttctctgctcttctccctttctaataccataaggcagttcttcgtgacttttacagaaacatatgtacacgtccttacagagtttaggagagcctgtgggctttttgccttagtctgctagaaagactggcctgctgctctctgctttatccagaggtctgcctctgggacttcagccctgtagctgtagagaccagaagaccaaccctctttgagacccagatgctactttcccttgcgtccccctctctttcctctcccaatgagccaaccttttgcacttccactagaatgccaggcaggctgggcccccaaaggctcctttttcaaaacctctggaagccgcggttgaatgtgccatgaccctctccctctctggatggcaccatcattgaagctggcgtcatcggagtctcttgttctgttggcgtgctacctggaagatccttctgtcctggacaagaggaattggaagagcattttatgttttaagaacaggctgacacgcagcagctacaacaacagctgagatcacttaataaatggtgctaaactaaaaaaaaaaaaaaaaaaaaaaaaaaaaaaaa

SEQ ID NO: 654 - DNA, 2812 bp, Homo sapiens
  misc feature (158): n equals a,t,g, or c
  misc feature (294): n equals a,t,g, or c
  misc feature (2651): n equals a,t,g, or c
tttttttttttttttttttttttttttttttggtttcatggtctgatttattggtggtgaatacacaggggcaggcccaggacaagcagcttggctactccccctctgctggctgcccgaccggcagagggggctccatgtggcaggagctaggctcncaacgcccactgttcttgccaccctctgggctcccaggctgggctccgctaggctcctgtctcccctgccagttagttaggcaagttcaggtgtggaggccgcagggatagatccaggtggctctgggctgggccntcttctcttcccagcggggaggtgctgttggcctggctgggctggcctgaatctgtttcaagttctcccttcctgcccagctcagttcaccagtgctggatccaggttcaaatgacagggacttgggtttttacaacagcgtggcaagtggtctgtctcctgggcagccatatcccagacccactgggttgaaggttctgtggggtggagggaccccaaggtgttccaagccagtggctgcactggcagcaggcctctgagagggaggcgggaagggtaggcgcggagagcaggctccattctgggtcgagtggaggactggctcccagggtgagttcacaccagtgctcccagctggcggctgctcagtctctcctgctgggcgagcgcggggggccggggctatgccatgctgctggtggagcagggggtgctctgggtgctcccgatgctgtggttggtgctgctgctctccgaggaggccggggcagccaccgccaccacgggctcccgcttgctgggggaacgcgtgtgcgagtagatgtaccagagtgcagcagtgagcagggccccgatgaggaaggcaccaaaggtgatgcccagcacggcgggcaggacgaggcctttgcttgtgcaaccagacaggtcagggctgatgatgttcaagcgcatgaagacagtcctatggacttcctggtcttgagacccggtcttgggacgcagggctaccgtgcagctgagggtgccggttttgggtatgggtactgtgtagaagtggaggaggaagctgaagcgcgggtcaccctcggggcttggggacagcaggctcacacagttgcccttggccgcccggccctggatgagttccacggtgcctccctcaggccccaagtccaggtggcagctgtctaactggagcaggaactcggagacggatggggacactctgacctgcacaaagctctgctctgccgcckgccaccgctgcccgagcccgacgctatgtccagcaaaggctccgtggttctggcctacagtggcggcctggacacctcgtgcatcctcgtgtggctgaaggaacaaggctatgacgtcattgcctatctggccaacattggccagaaggaagacttcgaggaagccaggaagaaggcactgaagcttggggccaaaaaggtgttcattgaggatgtcagcagggagtttgtggaggagttcatctggccggccatccagtccagcgcactgtatgaggaccgctacctcctgggcacctctcttgccaggccctgcatcgcccgcaaacaagtggaaatcgcccagcgggagggggccaagtatgtgtcccacggcgccacaggaaaggggaacgatcaggtccggtttgagctcagctgctactcactggccccccagataaaggtcattgctccctggaggatgcctgaattctacaaccggttcaagggccgcaatgacctgatggagtacgcaaagcaacacgggattcccatcccggtcactcccaagaacccgtggagcatggatgagaacctcatgcacatcagctacgaggctggaatcctggagaaccccaagaaccaagcgcctccaggtctctacacgaagacccaggacccagccaaagcccccaacacccctgacattctcgagatcgagttcaaaaaaggggtccctgtgaaggtgaccaacgtcaaggatggcaccacccaccagacctccttggagctcttcatgtacctgaacgaagtcgcgggcaagcatggcgtgggccgtattgacatcgtggagaaccgcttcattggaatgaagtcccgaggtatctacgagaccccagcaggcaccatcctttaccatgctcatttagacatcgaggccttcaccatggaccgggaagtgcgcaaaatcaaacaaggcctgggcttgaaatttgctgagctggtgtataccggtttctggcacagccctgagtgtgaatttgtccgccactgcatcgccaagtcccaggagcgagtggaagggaaagtgcaggtgtccgtcctcaagggccaggtgtacatcctcggccgggagtccccactgtctctctacaatgaggagctggtgagcatgaacgtgcagggtgattatgagccaactgatgccaccgggttcatcaacatcaattccctcaggctgaaggaatatcatcgtctccagagcaaggtcactgccaaatagacccgtgtacaatgaggagctggggcctcctcaatttgcagatcccccaagtacaggcgctaattgttgtgataatttgtaattgtgacttgttctccccggctggcagcgtagtngggctgccaggccccagctttgttccctggtccccctgaagcctgcaaacgttgtcatcgaagggaagggtggggggcagctgcggtggggagctataaaaatgacaattaaaagagacactagtcttttatttctaaaaaaaaaaaaaaggaaaagagat

SEQ ID NO: 655 - DNA, 1997 bp, Homo sapiens
ttcggcacgagccaatttctcctccccctcccggccaagatgtctgacatggaggatgatttcatgtgcgatgatgaggaggactacgacctggaatactctgaagatagtaactccgagccaaatgtggatttggaaaatcagtactataattccaaagcattaaaagaagatgacccaaaagcggcattaagcagtttccaaaaggttttggaacttgaaggtgaaaaaggagaatggggatttaaagcactgaaacaaatgattaagattaacttcaagttgacaaactttccagaaatgatgaatagatataagcagctattgacctatattcggagtgcagtcacaagaaattattctgaaaaatccattaattctattcttgattatatctctacttctaaacagatggatttactgcaggaattctatgaaacaacactggaagctttgaaagatgctaagaatgatagactgtggtttaagacaaacacaaagcttggaaaattatatttagaacgagaggaatatggaaagcttcaaaaaattttacgccagttacatcagtcgtgccagactgatgatggagaagatgatctgaaaaaaggtacacagttattagaaatatatgctttggaaattcaaatgtacacagcacagaaaaataacaaaaaacttaaagcactctatgaacagtcacttcacatcaagtctgccatccctcatccactgattatgggagttatcagagaatgtggtggtaaaatgcacttgagggaaggtgaatttgaaaaggcacacactgatttttttgaagccttcaagaattatgatgaatctggaagtccaagacgaaccacttgcttaaaatatttggtcttagcaaatatgcttatgaaatcgggaataaatccatttgactcacaggaggccaagccgtacaaaaatgatccagaaattttagcaatgacgaatttagtaagtgcctatcagaataatgacatcactgaatttgaaaagattctaaaaacaaatcacagcaacatcatggatgatcctttcataagagaacacattgaagagcttttgcgaaacatcagaacacaagtgcttataaaattaattaagccttacacaagaatacatattccttttatttctaaggagttaaacatagatgtagctgatgtggagagcttgctggtgcagtgcatattggataacactattcatggccgaattgatcaagtcaaccaactccttgaactggatcatcagaagaggggtggtgcacgatatactgcactagataaatggaccaaccaactaaattctctcaaccaggctgtagtcagtaaactggcttaacagagaacaagcttttacagacgtccttaaggcaacagtgcagagatgtaatccttaaaagaactgggaatggcaaaactactgtcggttgatgtgtcctgaaaattattggagttatggcagaagtgcttttttgatcaactggtttgtgttttgctgctgcatttatcccaagaaaaacagctttaatctccagaagaaaaccaaaataccatgggatttatgctgtattgacatcttgccctaaacgtacaacatcatagtaatttgtcatgggcaacatgaccagagagaagatttttgtcatgattttaaatacactgacacgctactgttggttaaatttaaacatgttttacctgcagaaattctctcacaaataacctgcaataacttgaaatgcatacccttttgaacacttccttttctcatgtataaattaaaatgtttgctgcattttgcaaaatgtcaattctctaaaaatgtgtccgtatatttctgtacctgcagtgtagtaaaggtttagacgaaaccccataattatagtggcatactgtcacttaggtttcaagcagcaaaataaacagtgcagctcagaaaaaaaaaaaaaaaaaaaaaaaaaaaaa

SEQ ID NO: 656 - DNA, 1597 bp, Homo sapiens
gctagtccttcggcgagcgagcaccttcgacgcggtccggggaccccctcgtcgctgtcctcccgacgcggacccgcgtgccccaggcctcgcgctgcccggccggctcctcgtgtcccactcccggcgcacgccctcccgcgagtcccgggcccctcccgcgcccctcttctcggcgcgcgcgcagcatggcgcccccgcaggtcctcgcgttcgggcttctgcttgccgcggcgacggcgacttttgccgcagctcaggaagaatgtgtctgtgaaaactacaagctggccgtaaactgctttgtgaataataatcgtcaatgccagtgtacttcagttggtgcacaaaatactgtcatttgctcaaagctggctgccaaatgtttggtgatgaaggcagaaatgaatggctcaaaacttgggagaagagcaaaacctgaaggggccctccagaacaatgatgggctttatgatcctgactgcgatgagagcgggctctttaaggccaagcagtgcaacggcacctccaygtgctggtgtgtgaacactgctggggtcagaagaacagacaaggacactgaaataacctgctctgagcgagtgagaacctactggatcatcattgaactaaaacacaaagcaagagaaaaaccttatgatagtaaaagtttgcggactgcacttcagaaggagatcacaacgcgttatcaactggatccaaaatttatcacgagtattttgtatgagaataatgttatcactattgatctggttcaaaattcttctcaaaaaactcagaatgatgtggacatagctgatgtggcttattattttgaaaaagatgttaaaggtgaatccttgtttcattctaagaaaatggacctgacagtaaatggggaacaactggatctggatcctggtcaaactttaatttattatgttgatgaaaaagcacctgaattctcaatgcagggtctaaaagctggtgttattgctgttattgtggttgtggtgatagcagttgttgctggaattgttgtgctggttatttccagaaagaagagaatggcaaagtatgagaaggctgagataaaggagatgggtgagatgcatagggaactcaatgcataactatataatttgaagattatagaagaagggaaatagcaaatggacacaaattacaaatgtgtgtgcgtgggacgaagacatctttgaaggtcatgagtttgttagtttaacatcatatatttgtaatagtgaaacctgtactcaaaatataagcagcttgaaactggctttaccaatcttgaaatttgaccacaagtgtcttatatatgcagatctaatgtaaaatccagaacttggactccatcgttaaaattatttatgtgtaacattcaaatgtgtgcattaaatatgcttccacagtaaaatctgaaaaactgatttgtgattgaaagctgcctttctatttacttgagtcttgtacatacatacttttttatgagctatgaaataaaacattttaaactgaaaaaaaaaaaaaaaaaaaaaaagtcgacgccaggaatttagtagtagtagtaggcggc

SEQ ID NO: 657 - DNA, 372 bp, Homo sapiens
gcttggcctcgcccgcaacaccctcctggaggatgctggtgagaggcagggaccaggggtcggctcccggctcgggcctatcgttaggcgctgggcccccaggcctctcctttgcagagtctcgctgcctccctcgacgcagagccttcaagcgccgcagtccccgacggcttccccgcgggccccactgtctccccaagacgcctggcgaggccgccggggctggaggaggcgctgagcgcgctggggctgcagggagaacgcgatacgccggggacatcttcgccgaagtcatggkctgggtcaagagaaaggcagaagcacagtgttggagagtgaagcgtccctgccccaaacccaagttttccgcgt

SEQ ID NO: 658 - DNA, 1226 bp, Homo sapiens
  misc feature (378): n equals a,t,g, or c
  misc feature (1220): n equals a,t,g, or c
  misc feature (1226): n equals a,t,g, or c
agcaaccctctaagacgcactgcaccatgtgtagtggccatcagagaggggatgtgagtrggaggaaaggggtctgtaaagcgggagaacaaggctagcctccccctaacaatcctagactgagacgcagtcaggcgcacgccgcaagaggcggcgaggtgacaagtttggagtgcgcccccttcagtactgcgcgttctaagacttttggcggagactttcttggcaaaacccattccccaaagctacgcttcccctgctgagatagcccctacccccacctccacaggctgggacagcccgtccccaccatcctcctcccaagccaattaaatgatcacagcacgcgtgacagttaccggctggagagccaggtgnggaccgggagcaggggaccgtagaaccgggccgcgctcctcccctcctagagttcgtggaggcgcagcagagggccgtccctcttccggatgtcggactaagcgaacagcgcccccactgccggccggtagcagccggaagtgccagaccggaggtgcgtcattcaccggcgacgccgatacggttcctccaccgaggcccatgcgaagctttccactatggcttccagcactgtcccggtgagcgctgctggctcggctaatgaaactcccgaaataccggacaacgtgggagattggcttcggggcgtctaccgctttgccactgataggaatgacttccggaggaacttgatactaaatttgggactctttgctgcgggagtttggctggccaggaacttgagtgacattgacctcatggcacctcagccaggggtgtagccaagtagacaaatggaatcctgtgctgaacccgaatcttccaaaaaacagcctacaatctgtgaccaccacaagatgtgccctgatggcagctgaagtttgattcagatgggcacttttcttccccttccctgcctagtttccttttgttccttgagtccacgcagaattccattctctggtcagcagacaggcttaagctaaagtattgcctctattctgtaaagttctgtacatagttcccaagcttctgcagggggtgatttttgctcttgtcctgagaaataacagtgctgttttaaaaaacatttgaaataaataccgcacacaaaggcaaaaaaaaaaaaagggsggccggttttagaagatccaaagcttacgtacccgtgcatgcgaagncattan

SEQ ID NO: 659 - DNA, 464 bp, Homo sapiens
  misc feature (25): n equals a,t,g, or c
  misc feature (37): n equals a,t,g, or c
cagacgcacctactatgggaaaacntggaactgccgngcgaggtacctggtccggaattcccgggtcgacccacgcgtccgggcggactggggaggcggcggcctggctcggcctggcctggcctgtcagggcgcgggcggcggcggctccagcaccatgtccctgcagtacggggcggaggagacgcccctcgccggcagttacggcgcggccgattcgtttccaaaggacttcggctacggcgtggaggaggaggaagaggaggcggcggcggcgggcggaggggttggggcaggggcaggcggtggctgtggtccggggggcgctgacagctccaagccgaggattctgctcatggggactccggcgcaggscaaattcctccatccagaaagtggtgttytcataaagatgttcaaccaacgagaccctctttttttgggaaattaccaaacaagatttt

SEQ ID NO: 660 - DNA, 2549 bp, Homo sapiens
gcaaagaatgtgagagggactccagtggtttcaggatgacctgcctagggacagagaagccagggttaccactctgagggctggaggagcccttggtacaaaagcaccatctgtaacctctgagcagctgaacgtgtatgagcacagaacacaccttcctttctccgtaactttatgcattacactgtccctctgctaggagtgtcctgcccggcctctttctcacctttacacctgtcttcttatcctcacatctgttttcacaccttcatccctgtcttcctcatgttcacacttgtcttccccatgttcatagctgcctttcttaccattttggtttgaagggcagtcttctctggcttgtttttttgtttttcccagaaaatcagtattattttttaaataagaaaaacattcctagaagatgawaattgtgaaaacctcctttggcttatttgcttttccagattttagtctcctttctccccatccgggaaagatggtggaagacataggctaaatttctccagcctcacaatggtcttcacttggtctgacttgtaccaattctagcacccactgaaaaacaagttgagtagagagtgtagagtgcagaaatgtggcttttgccccactttgcatctccaaaattacaacggttggccgatcccatttgaggacaatgcttagttataagtctccgagttggaaaaggaagaaagccagagctgtctagtttcattcattctttcagtaaatatttattgagtacctactgtgtgctaggcattgacctgggaactagaactagagatacttcacagaataacagggaaagttccctgtgctcatggagcttacattctacagggagaaagagatagccaatacataggaataaatatatacaaggtatcatgtagtgataattgctgtggagaaaaataaagcaggggagggagtaagaaatcctggagatgaggctgcagttttaaatggggcctcactgggaatgtgacgttgagcagagacgttagggaagtggatcctkgacaaggcmttccaggcagaggaacaggatgtgcactgccccaaagtgagaacttgctctacgtggtcaggaaagagcagggagaccaagcagagtcgtgggcaggggtagaatggaaggagaggcggctggrgaggacaggtggtggagggccttggcttctgctaagtgagatgggaaccactggagggtttgaacagaggagtgccttgattgatttatattttgcaagggtcattctagctgccatattgtgaaaaactttagtggacaagggcagaaggaagagggaagacctgttaggaagctactgcaaggttccaggcttgggcctgggccacagcaacagcagtggtcaaatatctagatttattttgaaaagagccaataggatttgctgagagtttgaatgtggagtgtaagaraaggaagagttaatgatgacattaaggtttttggcctgaatagcaggaaagatggagttaccagttactgaaatagggaaggatgggctgggtaagtawggaatttggtgcaaagcaggctgtctgtggttggaatgggaggttctggctgcaaatcaaagtggagagttctctcaggtcaggtctgcagcagagctcgagacagggatctgaatgcacttggtttattgttgggggtgctctcagaaggaacctgtgaaagcctttatcagtcatttattggctgtgagaagttctctgggagtgtgggtacatttgaaggcaagtgacttcagttgagggcaagtctctggaaaagaggctgtaggcatctggcagctaccatgcatggtagtgtgttgggggtgggggtcctgggcactggctgtgtgaagggatctggcagggcaccacagcgccccctactgaaccatcagcatgtcagtggcatttaaagccatgcagctggaggggccactgagattgtctctgagtattactgagaagcaacagaaaagagccatggatggagcccttgggctctctgggaaatgggaaatcagccaaaggactgagaaggagttaccttaaggtcagagaaaaccaagagagtgtggtgttctggaagctgagctttctttattcaacctcattcccttctccaaataagccacttgtgtagttgggcccctccagggttgaaggcaagaggagaaaggcacagcgtttgggaaacaagacttttcctgcaatagcctgggaaggaataaaaggatagagtgtttgggtttttgtgtaatggtggttaattggggtggaacactcacacgttgtgcttttyctgggcttcccttatcccccagaacactctaccaacctcggggaactcgggcacatccttctgtttctccttcagctctatcctgctttcctcatcccttctgacaccacgtcctcactcacctgcacaagaatccctgcatcaggttctcctttgagggtacccacccaggacagtcccctaccacttctgt

SEQ ID NO: 661 - DNA, 1162 bp, Homo sapiens
  misc feature (1155): n equals a,t,g, or c
ggcgcctcggagcccgcggggacgctgcggggggacccgtgctgargcggcggcggcgacgtgggctgcggcgggcccgcggcgtcgggcggtgcggatgtcgggctgggcggacgagcgcggcggcgagggcgacgggcgcatctacgtggggaaccttccgaccgacgtgcgcgagaaggacttggaggacctgttctacaagtacggccgcatccgcgagatcgagctcaagaaccggcacggcctcgtgcccttcgccttcgtgcgcttcgaggacccccgagatgcagaggatgctatttatggaagaaatggttatgattatggccagtgtcggcttcgtgtggagttccccaggacttatggaggtcggggtgggtggccccgtggtgggaggaatgggcctcctacaagaagatctgatttccgagttcttgtttcaggacttcctccgtcaggcagctggcaggacctgaaggatcacatgcgagaagctggggatgtctgttatgctgatgtgcagaaggatggagtggggatggtcgagtatctcagaaaagaagacatggaatatgccctgcgtaaactggatgacaccaaattccgctctcatgagggtgaaacttcctacatccgagtttatcctgagagaagcaccagctatggctactcacggtctcggtctgggtcaaggggccgtgactctccataccaaagcaggggttccccacactacttctctcctttcaggccctactgagacaggtgatgggaattttttctttattttttaggttaactgagctgctttgtgctcagaatctacattccagattgaggatttagtgtcttaggaaatttttttaattttttttttttaaagaagaaaaaaaactacataatttctaccagggccatattagcagtgaaacattttaaactgcagaaattgtggttttggttcagaaacaagttgtatatttttcacccctgattatgggaaaaaaatcagttctgtctttgtgggttgctctactatggagatcaacagttactgtgactgagtcggcccattctgtttagaaatatattttaaatgtttagtaaaaaaaaaaaaaaaaaaaaaaaaaaaggggggccccccaaaggggnccaagct

SEQ ID NO: 662 - DNA, 1178 bp, Homo sapiens
  misc feature (978): n equals a,t,g, or c
gccccgcgccgcccgcccgcccgccatggagcccggccccgacggccccgccgcctccggccccgccgccatccgcgagggctggttccgcgagacctgcagcctgtggcccggccaggccctgtcgctgcaggtggagcagctgctccaccaccggcgctcgcgctaccaggacatcctcgtcttccgcagtaagacctatggcaacgtgctggtgttggacggtgtcatccagtgcacggagagagacgagttctcctaccaggagatgatcgccaacctgcctctctgcagccaccccaacccgcgaaaggtgctgatcatcgggggcggagatggaggtgtcctgcgggaggtggtgaagcacccctccgtggagtccgtggtccagtgtgagatcgacgaggatgtcatccaagtctccaagaagttcctgccaggcatggccattggctactctagctcgaagctgaccctacatgtgggtgacggttttgagttcatgaaacagaatcaggatgccttcgacgtgatcatcactgactcctcagaccccatgggccccgccgaaagtctcttcaaggagtcctattaccagctcatgaagacagccctcaaggaagatggtgtcctctgctgccagggcgagtgccagtggctgcacctggacctcatcaaggagatgcggcagttctgccagtccctgttccccgtggtggcctatgcctactgcaccatccccacctaccccagcggccagatcggcttcatgctgtgcagcaagaacccgagcacgaacttccaggagccggtgcagccgctgacacagcagcaggtggcgcagatgcagctgaagtactacaactccgacgtgcaccgcgccgcctttgtgctgcccgagtttgcccgcaaggccctgaatgatgtgagctgagcccaggcgccaccactgatgccacccaggacctaccttggagnctgcggggtgctcggcccttccagccaagtgttacaagccccagaatgctgcccggcctgcctgctgggcggactgtctgtgtgtctgtctctctggcgttccacctccaagcctataccagctgtgtacagcgccatctctctgccttctgttgcccctcamtyaccaaacacgtgtatttatwgccaaaaaaaaaaaa

SEQ ID NO: 663 - DNA, 740 bp, Homo sapiens
  misc feature (25): n equals a,t,g, or c
  misc feature (546): n equals a,t,g, or c
  misc feature (618): n equals a,t,g, or c
  misc feature (639): n equals a,t,g, or c
  misc feature (652): n equals a,t,g, or c
ggcccgctcctagaacctagtgganccccccgggctgcaggaattcgcgagcgtctgggcgggtggtaggaacaatggcgctgtcttaagtggcacagtggagcagctctgaagatgcaaagatacacgaaaaaacttccagaacatctgggagaatatttaatggaaaatcgcttggttaaaacctgacacttttaacagtgaacagcgttctgagtgtggacgagtagccagtgaagataatgaatgtcgaatgtgactgactagcagcttcattttgaatgagggtcgctgtctgcccattgatagaggccagattgtcttggaagttccaaagttgcaacgatttctggctagtgccacgaggtttacttgactgttgtgtgaaaagctgataagaaaaccatccagaaaaaagctcttcgttttacaaacatgaaaataaaacatgtaattttggattatgttcctttttgttattacttttaaataggtcctgaaataacatggggagcattaaatggaaaatccactaaccagcttgtntcaaattactgtgagtgaatgtttccgggtttgtgcaaggtacatgtaagggttttgggtcaatggtaagantggagagacaagaattagaantaatgttactaancaaatcaagggatattaattttggagtaacataatttgaaagcctggatgctaagttgagaaatgggggaatgagatcagaaattagg

SEQ ID NO: 664 - DNA, 1670 bp, Homo sapiens
ggcacagcagtctccttccacaaaaccatggcgtcgctcaaatgtagcaccgtcgtctgcgtgatctgcttggagaagcccaaataccgctgtccagcctgccgcgtgccctaaacagtgcaaccctgaaactcgtcctgttgagaaaaaaataagatcagctcttcctaccaaaaccgtaaagcctgtggaaaacaaagatgatgatgactctatagctgattttctcaatagtgatgaggaagaagacagagtttctttgcagaatttaaagaatttaggggaatctgcaacattaagaagcttattgctcaatccacacctcaggcagttgatggtcaacctcgatcagggagaagacaaagcaaagctcatgagagcttacatgcaagagcctttgtttgtggagtttgcagactgctgtttaggaattgtggagccatcccagaatgaggagtcttaagatggattattgtgctgcttgctcaagcgtgtgcttgactcctggaacctgcctgctccctctcccagaccagctagtttggggctggggagctcaggcaaaagaggtttccaggatgcagattaggtcatgcaggcctttaccggcattgatgtggctcatgtttcaggcagacttggggtccttaaggtggcaagtcctttatggagagaaaacttgacattcagatgattgtttttaaatgttttacttttggtacagttgatagacatcataaacgatatcaagcttacacttcatatggagttaaacttggtcagtgttaataaaatcaaaacgtgattctactgtacattgcattattcataatttaattgtttgaaattacattaaataaatcaactaattaaatactaaagttttgttcctttttaaaggaaataaccacaagatttttcccagcccaaattccagcgccaattttaggccaactttggctgttttcttccaaaagtgcttatgtggaattgggatccccagtgtagtgacagacagtcatgactgctgctgagtttgatctgtgaaggtagtgaaatgtggccctgatgtttcttaaccctgatttggtaactaccagccctgacaccatcagtgcttgatgtagcctggaaccccaggcccactgacgcactgggcacggggctctgggtcgaaggctggagccgtcactgttgttcatgtgcatttggagcactgtgggaatagtctggcagctgtgtgctgattaaatgtctttggcaaggcagggggcaggaaaaggccttgtggaaacaaaggcaccaaggatcaccccagcccagtgaaggcagaagaggtcacgtggatcagcctgtgtctttccagcagaatctgattaaagcctgtaatgctgtagggtgaaggttcagggcagatgtcagcataccgcagtggagactttctgcagtgaaactttatcgatccctagaggggagagagagatgcagctttagcactagttcctgggagtgccagggcctaacaaccccacagagcagacgctaaaaatgcaagaaggtatggacaagtactagtattgggggccacagcaggrttaaaatagcattacatccactyagtktgagacagatgaggaaaccctaggaggaggcgctccctaagaggaatg

SEQ ID NO: 665 - DNA, 3364 bp, Homo sapiens
  misc feature (643): n equals a,t,g, or c
  misc feature (898): n equals a,t,g, or c
  misc feature (1097): n equals a,t,g, or c
  misc feature (1470): n equals a,t,g, or c
  misc feature (1881): n equals a,t,g, or c
tcgacccacgcgtccgactgagcgctggttgcccatgcggccctagggctgggagcgcggcgccgctctccgctgcgggggaggccatggcggaaccttcccaggccccgaccccggccccggctgcgcagccccggccccttcagtccccagcccctgccccaactccgactcctgcacccagcccggcttcagccccgattccgactcccaccccggcaccagcccctgccccagctgcagccccagccggcagcacagggactggggggcccggggtaggaagtgggggggccgggagcgggggggatccggctcgacctggcctgagccagcagcagcgcgccagtcagaggaaggcgcaagtccgggggctgccgcgcgccaagaagcttgagaagctaggggtcttctcggcttgcaaggccaatgaaacctgtaagtgtaatggctggaaaaaccccaagccccccactgcaccccgcatggatctgcagcagccagctgcaacctgagtgagctgtgccgcagttgtgagcaccccttggctgaccacgtatccacttggagaatgtgtcagaggatgagataaaccgactgctggggatggtggtggatgtggagaatctcttcatgtcwgktnacaaggaagaggacacagacaccaagcaggtctatttctacctcttcaagctactgcggaaatgcatcctgcagatgacccggcctgtggtggaggggtccctgggcagccctccatttgagaaacctaatattgagcagggtgtgctgaactttgtgcagtacaagtttagtcacctggctccccgggagcggcagacgatgttcgagctctcaaagatgttcttgctctgccttaactactggaagcttgagncacctgcccagtttcggcagaggtctcaggctgaggacgtggctacctacaaggtcaattacaccagatggctctgttactgccacgtgccccagagctgtgatagcctcccccgctacgaaaccactcatgtctttgggcgaagccttctccggtccattttcaccgttacccgccggcagctgctggaaaagttccnagtggagaaggacaaattggtgcccgagaagaggacctcatcctcactcacttccccaagtaaggctccttctggcctaccaggatttggccccaagttcacatcctccctgttgtccccttttttccagraaggcttcctggattggtccctcctctccctccatgggccttttgggatctgggcgtctacctggcagacttgcccatggcccagaagcaacttgctagtactagtctggggatggcagattcctgtccatgctggaggaggagatctatggggcaaactctccaatctgggagtcargcttcamcatgccamcctcagaggggacacagctggttycccgggccagcttcagtcagtgcangggttgttcccagcacccccatcttcagccccagcatgggtgggggcagcaacagctccctgagtctggattctgcaggggccgagcctatgccaggcgagaagaggacgctcccagagaacctgaccctggaggatgccaagcggctccgtgtgatgggtgacatccccatggagctggtcaatgaggtcatgctgaccatcactgaccctgctgccatgctggggcctgaracgagcctgctttcggccaatgcggcccgggatgagacagcccgcctggaggagcgccgsggcatcatcgagttccatgtcatcggcaactcactgacgcccaaggccaaccggcgggtgttgctgtggctcgtggggctgcagaatgtcttttcccaccagctgccgcgcatgcctnaaggartatatcgcccgcctcgtctttgacccgaagcacaagactctggccttgatcaaggatgggcgggtcatcggtggcatctgcttccgcatgtttcccacccagggcttcacggagattgtcttctgtgctgtcacctcgaatgagcaggtcaagggttatgggacccacctgatgaaccacctgaaggagtatcacatcaagcacaacattctctacttcctcacctacgccgacgagtacgccatcggctacttcaaaaagcagggtttctccaaggacatcaaggtgcccaagagccgctacctgggctacatcaaggactacgagggagcgacgctgatggagtgtgagctgaatccccgcatcccctacacggagctgtcccacatcatcaagaagcagaaagagatcatcaagaagctgattgagcgcaaacaggcccagatccgcaaggtctacccggggctcagctgcttcaaggagggcgtgaggcagatccctgtggagagcgttcctggcattcgagagacaggctggaagcattggggaaggagaaggggaaggagctgaaggaccccgaccagctctacacaaccctcaaaaacctgctggcccaaatcaagtctcaccccagtgcctggcccttcatggagcctgtgaagaagtcggaggcccctgactactacgaggtcatccgcttccccattgacctgaagaccatgactgagcggctgcgaagccgctactacgtgacccggaagctctttgtggccgacctgcagcgggtcatcgccaactgtcgcgagtacaaccccccggacagcgagtactgccgctgtgccagcgccctggagaagttcttctacttcaagctcaaggagggaggcctcattgacaagtaggcccatctttgggccgcagccctgacctggaatgtctccacctcggattctgatctgatccttagggggtgccctggccccacggacccgactcagcttgagacactccagccaagggtcctccggacccgatcctgcagctctttctggaccttcaggcacccccaagcgtgcagctctgtcccagccttcactgtgtgtgagaggtctcctgggttggggcccagcccctctagagtagctggtggccagggatgaaccttgcccagccgtggtggcccccaggcctggtccccaagagctttggaggcttggattcctgggcctggcccaggtggctgtttccctgaggaccagaactgctcattttagcttgagtgatggcttcaggggttggaagttcagcccaaactgaagggggccatgccttgtccagcactgttctgtcagtctcccccaggggtggggggtatggggaccattcattccctggcattaatcccttagagggaataataaagctttttatttctctgaaaaaaaaaaaaaaaaaaaaaccttgggggggggcccgt

SEQ ID NO: 666 - DNA, 1223 bp, Homo sapiens
  misc feature (1122): n equals a,t,g, or c
  misc feature (1123): n equals a,t,g, or c
  misc feature (1133): n equals a,t,g, or c
  misc feature (1137): n equals a,t,g, or c
  misc feature (1205): n equals a,t,g, or c
attcggcacgtggaaaaaaaaaaaaaaaaccctcagagatagtctttgtgaagagcttctgacagaatcactgagtaccttccttcccccagatgwggaagacawgggggtctcagtgtctgtgctgtctcctcttctcttccccaaccaaggactgtgccattactgcccgtctcaactgtccatgcaggaggacagagttgcctggwactcttacccttgtccctctcctaaagggagcacaaggaaactgaagagactgaaaaagaagagagtttgtagctgaaaaagaatagggatagcaaggaaacccagaactgcattcccctaagtggggccatcccatgtgattgaattgtccatagcttgcctatggtgagaaatgtgcatgctccgtgagctggtctcttgaaacaggacttatgyttcctctatattctggttaaattttccaaacacataagttcactgagcacagatttcttatccagagacaagtagaatctaaccgcagactgttggcagagtttccaggcacttagccatgttcccttcctgactcaaatccccaaaggccttcactctcactgagaatcacactactgtcccatagataaggcaggcattgaagcacctgtcgtgatcctctaggggggagaatgaaaggttatttcctgcattgcatcatcatagcttttaatataatgctacagaatcatatccacattaggttagagttcagatatttggatatgaatacctaacctagccatatccatggccatctctgttcttttcagcaatgttttccatattatattagcaatgacagaaacagaacaagccaagatccagtcagttcttgggagcttgtctagagcaccaagtaatgaaatagccaggtagtgggatgactgtacctttaaaaatacataatttagtttgcaagctatattatgctactttctattttcctygttactttatagcaattcattttaccctcacaaagtcaatttagaaccttatcattaactggggatgtgtagtggawatttttggggcctctggggggttccatggtggccaataccaagggaataatttaatttaaaaataggnnttatttagangganggcaccagtggtggttggacctgtgggacaccaccccatatttttaaaaacccttggaaggttccccnaaattggtgtgaccggaa

SEQ ID NO: 667 - DNA, 1997 bp, Homo sapiens
  misc feature (1289): n equals a,t,g, or c
  misc feature (1951): n equals a,t,g, or c
  misc feature (1974): n equals a,t,g, or c
gtggaggggcggcttggggcaagcgcgcgcgcgcagtgcagaagccagccccccgcggctgaggtactcaaggtgcccaaaggcggggtagtgacctcgcgcgtgcgctgtgcccgcggcagcgccgggtcctagtgtgtgggttgttgttggcaccgcacggcgcgtgcgcagtgaggacggcggagggatttgcggccgggacccaccccctgctccagtcgctatcggaggccgcgcgggtggctgagcagcggcctggtgcgctcgcttagcgggcgacggaatcagacggacgtggacgcccccggagtggaagccgaagcaggagttgttgttgctgaggggctgccgcagccgccgcgagcctccggacagacgccagagcgaggagggcgctacgcgacttggcaagatgacccagttcctgccgcccaaccttctggccctctttgccccccgtgaccctattccatacctgccacccctggagaaactgccacatgaaaaacaccacaatcaaccttattgtggcattgcgccgtacattcgagagtttgaggaccctcgagatgcccctcctccaactcgtgctgaaacccgagaggagcgcatggagaggaaaagacgggaaaagattgagcggcgacagcaagaagtggagacagagcttaaaatgtgggaccctcacaatgatcccaatgctcagggggatgccttcaagactctcttcgtggcgagagtgaattatgacacaacagaatccaagctccggagagagtttgaggtgtacggacctatcaaaagaatacacatggtctacagtaagcggtcaggaaagccccgtggctatgccttcatcgagtacgaacacgagcgagacatgcactccgcttacaaacacgcagatggcaagaagattgatggcaggagggtccttgtggacgtggagaggggccgaaccgtgaagggctggaggcccggcggctaggaggaggcctcggtggtaccagaagaggaggggctgatgtgaacatccggcattcaggccgcgatgacacctcccgctacgatgagaggcccggcccctccccgcttccgcacagggaccgggaccgggaccgtgagcgggagcgcagagagcggagccgggagcgagacaaggagcgagaacggcgacgctcccgctcccgggaccggcggaggcgctcacggagtcgcgacaaggaggagcggaggcgctccagggagcggagcaaggacaaggaccgggaccggaagcggcgaancagccggagtcgggagcgggcccggcgggagcgggagcgcaaggaggagctgcgtggyggcggtggcgacatggcggagcctccgaggcgggtgacgcgccccctgatgatgggcctccaggggagctcgggcctgacggccctgacggtccagaggaaaagggccgggatcgtgaccgggagcgacggcggagccaccggagcgagcgcgagcggcgccgggaccgggatcgtgaccgtgaccgtgaccgcgagcacaaacggggggagcggggcagtgagcggggcagggatgaggcccgaggtgggggcggtggccaggacaacgggctggagggtctgggcaacgacagccgagacatgtacatggagtctgagggcggcgacggctacctggctccggagaatgggtatttgatggaggctgcgccggagtgaagaggtcgtcctctccatctgctgtgtttggacgcgttcctgcccagccccttgctgtcatcccctcccccaaccttggccacttgagtttgtcctccaagggtaggtgtctcatttgttctggccccttggatttaaaaataaaattaatttcctgttgawaaaaaaaaaaaaaaaaaaaaaaraaaaggagagccgctcttagaggatccctccgagggggncccaagctttacgcgtggcatgncgaagtcaaaagccctttccccc

SEQ ID NO: 668 - DNA, 586 bp, Homo sapiens
gcgcccgcgtgacgtcatctaccccaaacgctgtggccccggcacgcacggcttcggggcgggactacgcggtgacgtcgaggtgcgcggcgcaccggcgtcmgtcttggctggcagacctgtactccgtactccgtacttcgtagtcgcagcggcgcggtcttcggcagtctagtcatccaccgccatcctgggccccacgtgttgcctgaccattcctgagcccaggtgggagccgtggctgaggtgacggtctcaaagtggaagagcttactgtcacagcaactcctttgcaagatgccccggccaggaatagttgctgaacaccccaggcctgctgaggtccctccttgagtctcatgttcaagcagtctttgtccatgaaactgggaggcgaccgtgttagctgccagttcctgacagccacctctcaccagtggcttcactctgtgtccctgacccagcacatggcacaagagtgctgccatccgtcagtgttytacagcagcaatcccagatgstggaasytaagggactgaccctattgaggttcgttatggttgtcagcttttcctgaatttttatt

SEQ ID NO: 669 - DNA, 1097 bp, Homo sapiens
tcgacccacgcgtccgggcgactccctatgttactgacgagaccggcggcaagtatatcgcgtcaacacagcgacctgacgggacctggcgcaascagcggagggtgaaagaaggatatgtgccccaggaggaggtcccagtatatgaaaacaagtatgtgaagtttttcaagagtaaaccagagttgcccccagggctaagccctgaggccactgctcctgtcaccccatccaggcctgaaggtggtgaaccaggcctctccaagacagccaaacgtaacctgaagcgaaaggagaagaggcggcagcagcaagagaaaggagaggcagaggccttgagcaggactcttgataaggtgtccctggaagagacagcccaactccccagtgctccacagggctytcgggcagcccccacagctgcatctgaccagcctgactcagctgccaccactgagaaagccaagaagataaagaacctaaagaagaaactccggcaggtggaagagctgcagcagcggatccaggctggggaagtcagccagcccagcaaagagcagctagaaaagctagcaaggaggagggcgctagaagaggagttagaggacttggagttaggcctctraggcctttggggaatagggaatggactgcagaacaaaccgtggggctctctggggtctgggggaatacgggcaacagcagtcaggaggggtaccccccatactggcttccacctcctgcggcccagctctgtcctccagagcctagcgtctccctcaatccttcccttttcttcccaacttctactttttggactttccccctcccattcccagtgttcaaaatctcagtgactaccccaggtacctttgctgctgatttgggtgtcttgtttaaaagaaaatcaggtgggtgggaatctcttggagaactgaggctgagggtagagggagtatgcccaagtcttggagtcttggttcctgttcgcggtgtttatgggttatttccctctccatccctcattttttttttttttttaaaaaaagcaaaaatgagaataaacacaagtagacatgtcaaaaaaaaaaaaaaaa

SEQ ID NO: 670 - DNA, 2900 bp, Homo sapiens
  misc feature (2418): n equals a,t,g, or c
tcgacccacgcgtccggccggctcgacggattgccatggcgccgctgctggagtacgagcgacactggtgctggaactgctcgacactgacgggctagtagtgtgcgcccgcgggctcggcgcggaccggctcctctaccactttctccagctgcactgccacccagcctgcctggtgctggtgctcaacacgcagccggccgaggaggagtattttatcaatcagctgaagatagaaggagttgaacacctccctcgccgtgtaacaaatgaaatcacaagcaacagtcgctatgaagtttacacacaaggtggtgttatatttgcgacaagtaggatacttgtggttgacttcttgactgatagaataccttcagatttaattactggcatcttggtgtatagagcccacagaataatcgagtcttgtcaagaagcattcatcttgcgcctctttcgccagaaaaacaaacgtggttttattaaagctttcacagacaatgctgttgcctttgatactggtttttgtcatgtggaaagagtgatgagaaatctttttgtgaggaaactgtatctgtggccaaggttccatgtagcagtaaactcatttttagaacagcacaaacctgaagttgtagaaatccatgtttctatgacacctaccatgcttgctatacagactgctatactggacattttaaatgcatgtctaaaggaactaaaatgccataacccatcgcttgaagtggaagatttatctttagaaaatgctattggaaaaccttttgacaagacaatccgccattatctggatcctttgtggcaccagcttggagccaagactaaatccttagttcaggatttgaagatattacgaactttgctgcagtatctctctcagtatgattgtgtcacatttcttaatcttctggaatctctgagagcaacggaaaaagcttttggtcagaattcaggttggctgtttcttgactccagcacctcgatgtttataaatgctcgagcaagggtttatcatcttccagatgccaaaatgagtaaaaaagaaaaaatatctgaaaaaatggaaattaaaraaggggaagaaacaaaaaaggaactggtcctagaaagcaacccaaagtgggaggcactgactgaagtattaaaagaaattgaggcagaaaataaggagagtgaagctcttggtggtccaggtcaagtactgatttgtgcaagtgatgaccgaacatgttcccagctgagagactatatcactcttggagcggaggccttcttattgaggctctacaggaaaacctttgagaaggatagcaaagctgaagaagtctggatgaaatttaggaaggaagacagttcaaagagaattaggaaatctcacaaaagacctaaagacccccaaaacaaagaacgggcttctaccaaagaaagaaccctcaaaaagaaaaaacggaagttgaccttaactcaaatggtaggaaaacctgaagaactggaagaggaaggagatgtcgaggaaggatatcgtcgagaaataagcagtagcccagaaasctgcccggaagaaattaagcatgaagaatttgatgtaaatttgtcatcggatgctgctttcggaatcctgaaagaacccctcactatcatccatccgcttctgggttgcagcgacccctatgctctgacaagggtactacatgaagtggagccaagatacgtggttctttatgacgcagagctaacctttgttcggcagcttgaaatttacagggcgagtaggcctgggaaacctctgagggtttactttcttatatacggaggttcaactgaggaacaacgctatctcactgctttgcggaaagaaaaggaagcttttgaaaaactcataagggaaaaagcaagcatggttgtccctgaagaaagagaaggcagagatgaaacaaacttagacctagtaagaggcacagcatctgcagatgtttccactgacactcggaaagccggtggccaggaacagaatggtacacagcaaagcatagttgtggrtatgcgtgaatttcgaagtgagcttccatctctgatccatcgtcgggacattgacattgaacccgtgactttagaggttggagattacatcctcactccagaaatgtgcgtggagcgcaagagtatcagtgatttaatcggctctttaaataacggccgcctctacagccagtgcatctccatgtcccgctactacaagcgtcccgtgcttctgattgagtttgaccctagcaagcctttctctctcacttcccgaggtgccttgtttcaggagatctccagcaatgacattagttccaaactcactcttcttacacttcacttccccagactacggattctctggtgcccctctcntcatgcaacggcggagttgtttgaggagctgaaacaaagcaagccacagcctgatgcggcgacagcactggccattacagcagattcygaaacccttcccgagtcagagaagtataatcctggtccccaagacttcttgttaaaaatgccaggggtgaatgccaaaaactgccgctccttgatgcaccacgttaagaacatcgcagaattagcagccctgtcacaagacgagctcacgagtattctggggaatgctgcaaatgccaaacagctttatgatttcattcacacctcttttgcagaagtcgtatcaaaaggaaaagggaaaaagtgaacagtgatggctgttttcttatcccatgcctgtacttttcagcggctccttgccagacatcataggtcattattaattattggtttgctatttcattcttttccaatgctcttaatgattgtacggtggaccagagttcagagagccc

SEQ ID NO: 671 - DNA, 987 bp, Homo sapiens
tcgacccacgcgtccggctgcgcagaggcgcggcggctgtacaactcggccgttgtcaccatgccggtcgtccggaagattttccgtcgccgccggggcgactcggagtcagaggaagatgagcaggactcagaggaggttcgattaaaactggaagagaccagagargtacagaacttgaggaagaggcccaacggggtgagtgctgtggccttgctggtgggagagaaggtacaagaggagaccactctagtggatgatccctttcagatgaagacaggtggtatggtggatatgaagaaactgaaggaaaggggcaaagataagatcagtgaggaggaggacctgcacctggggacatcgttttctgcagaaaccaaccgaaggatgaggatgcagacatgatgaagtacattgagacagagctaaagaagaggaaagggatcgtggaacatgaggaacagaaagttaagccaaagaatgcagaggactgtctttatgaacttccagaaaacatccgtgtttcctcagcaaagaagaccgaggagatgctttccaaccagatgctgagtggcattcctgaggtggacctgggcatcgatgctaaaataaaaaatatcatttccacggaggatgccaaggcccgtctgctggcagagcagcagaacaagaagaaagacagcgagacctccttcgtgcctaccaacatggctgtgaattatgtgcagcacaacagattttatcatgaggagctcaacgcgcccatacggagaaacaaagaagagcccaaggcccggcccttgagagtaggygacacggagaagccagagcctgagcggtcccctcctaaccgcaagcgtcctgctaacgagaaggcaactgatgactatcattatgagaagttcaagaaaatgaataggcggtactgagttgtgcasagtgggatgtaaatatcgccttcctctccctatatccctcccatgaaaa

SEQ ID NO: 672 - DNA, 2825 bp, Homo sapiens
cctcgagttcgtggtgatgttggaatggctggagttgctattgacactgtggaagataccaaaattctttttgatggaattcctttagaaaaaatgtcagtttccatgactatgaatggagcagttattccagttcttgcaaattttatagtaactggagaagaacaaggtgtacctaaagagaarcttactggtaccatccaaaatgatatactaaaggaatttatggttcgaaatacatacatttttcctccagaaccatccatgaaaattattgctgacatatttgaatatacagcaaagcacatgccaaaatttaattcaatttcaattagtggataccatatgcaggaagcaggggctgatgccattctggagctggcctatactttagcagatggattggagtactctagaactggactccaggctggcctgacaattgatgaatttgcaccaaggttgtctttcttctggggaattggaatgaatttctatatggaaatagcaaagatgagagctggtagaagactctgggctcacttaatagagaaaatgtttcagcctaaaaactcaaaatctcttcttctaagagcacactgtcagacatctggatggtcacttactgagcaggatccctacaataatattgtccgtactgcaatagaagcaatggcagcagtatttggagggactcagtctttgcacacaaattcttttgatgaagctttgggtttgccaactgtgaaaagtgctcgaattgccaggaacacacaaatcatcattcaagaagaatctgggattcccaaagtggctgatccttggggaggttcttacatgatggaatgtctcacaaatgatgtttatgatgctgctttaaagctcattaatgaaattgaagaaatgggtggaatggccaaagctgtagctgagggaatacctaaacttcgaattgaagaatgtgctgcccgaagacaagctagaatagattctggttctgaagtaattgttggagtaaataagtaccagttggaaaaagaagacgctgtagaagttctggcaattgataatacttcagtgcgaaacaggcagattgaaaaacttaagaagatcaaatccagcagggatcaagctttggctgaacgttgtcttgctgcactaaccgaatgtgctgctagcggagatggaaatatcctggctcttgcagtggatgcatctcgggcaagatgtacagtgggagaaatcacagatgccctgaaaaaggtatttggtgaacataaagcgaatgatcgaatggtgagtggagcatatcgccaggaatttggagaaagtaaagagataacatctgctatcaagagggttcataaattcatggaacgtgaaggtcgcagctcgtcttcttgtagcaaaaatgggacaagatggccatgacagaggagcaaaagttattgctacaggatttgctgatcttggttttgatgtggacataggccctcttttccagactcctcgtgaagtggcccagcaggctgtggatgcggatgtgcatgctgtgggcrtaagcaccctcgctgctggtcataaaaccctagttcctgaactcatcaaagaacttaactcccttggacggccagatattcttgtcatgtgtggaggggtgataccacctcaggattatgaatttctgtttgaagttggtgtttccaatgtatttggtcctgggactcgaattccaaaggctgccgttcaggtgcttgatgatattgagaagtgtttggaaaagaagcagcaatctgtataatatcctctttttgttttagcttttgtctaaaatattattttagttatgatcaaagaagagagtaaagctatgtcttcaatttaatttcaatacctgatttgtactttccttgaaagctttactttaaaataccttacttataggcctggtgtcatgctataagtatgtacatacagtttcacttcaaaaataaaaaaaaaatccctaaaaactctctatactctctataacaatactttatcaagaactctggacaatggtattatttttaaaaatcatggtgatgtatttattagaatgtttcttataaatctgtttactttttatattaagaattaaactgtacctaaaaaaactctgactattcccatttgtcagtttagcattacattgtcttgagcaccagaaaataaaatccatatattaataaaaacctatcttgaaaaactagtggagtgtatttacgtggcaaaagagattttgggaggagtcctcagccaaattctaccagaatcaccttaataaaagaagtattaaaatcaagcacagcaggttggaatatggggaatttgacagtatatttcttcaagtctgagtttactttcttcctgatcatgaccatctgaccttgttatttctgggcttggctcaagaccaaggagagtggatgttgatgaacattcctttaaataaaagtgcttaggttgtagttatggctttgtctagaatggtgatgtcaactgtgagtgtaggtctgtgatatagaaagaattcaactttccagatctagaaagatgctaccttgcatagatttgctccttaaacataaattgcaaaaataaaaatatcacagagaacacctgtactttgcttactgaaagatttgctcactaaagaaggaaagttgccatttacctgtttaacaaatctgcacatcctgcacatgttccccagaatgtaaaataaaaaaagtttaaataaaaaaaaaaaaaaaaaaaaaaaaaaaaaaaaaaaaaaactcgag

SEQ ID NO: 673 - DNA, 1430 bp, Homo sapiens
  misc feature (435): n equals a,t,g, or c
  misc feature (1046): n equals a,t,g, or c
  misc feature (1409): n equals a,t,g, or c
  misc feature (1413): n equals a,t,g, or c
ttagccaactctaatacgactcactmtaggggaaagctggtacgcctgcagtaccggtccgaattcccgggtcgacccacgcgtccggttccaaaatggcggcaggggtggccgggtggggggttgaggcagaggagttcgaagatgctcctgatgtggagccgctggagcctacacttagcaacatcatcgagcagcgcacctgaagtggatcttcgtcgggggcaagggtggtgtgggcaagaccacctgcagctgcagcctggcagtccagctctccaaggggcgtgagagtgttctgatcatctccacagacccagcacacaacatctcagatgcttttgaccagaagttctcaaaggtgcctaccaaggtcaaaggctatgacaacctctttgctatggagattgaccccagcctgggcgtggcggastngcctgacgagttcttcgaggaggacaacatgctgagcatgggcaagaagatgatgcaggaggccatgagcgcatttcccggcatcgatgaggccatgagctatgccgaggtcatgaggctggtgaagggcatgaacttctcggtggtggtatttgacacggcacccacgggccacaccctgaggctgctcaacttccccaccatcgtggagcggggcctgggccggcttatgcagatcaagaaccagatcagccctttcatctcacagatgtgcaacatgctgggcctgggggacatgaacgcagaccagctggcctccaagctggaggagacgctgcccgtcatccgctcagtcagcgaacagttcaaggaccctgagcagacaactttcatctgcgtatgcattgctgagttcctgtccctgtatgagacagagaggctgatccaggagctggccaagtgcaagattgacacacacaatataattgtcaaccagctcgtcttccccgaccccgagaagccctgcaagatgtgtgaggcccgtcacaagatccaggccaagtatctggaccagatggaggacctgtatgaagacttccacatcgtgaagntgccgctgttaccccatgaggtgcggggggcagacaaggtcaacaccttctcggccctcctcctggagccctacaagccccccagtgcccagtagcacagctgccagccccaaccgctgccatttcacactcaccctccaccctccccaccccctcggggcagagtttgcacaaagtcccccccataatacagggggagccacttgggcaggaggcagggaggggtccattccccctggtggggctggtggggagctgtagttgccccctacctctcccacctcttgctcttcaataaaatgatcttaaactgcaaaaaaaaaaaaaaaaaaaaaaaaaaaaaaaaaaaaaaaaaaaaaaaanaaanttaaaaaaaaaaaaaaa

SEQ ID NO: 674 - DNA, 1125 bp, Homo sapiens
  misc feature (1098): n equals a,t,g, or c
  misc feature (1103): n equals a,t,g, or c
  misc feature (1120): n equals a,t,g, or c
ggcacgaggagagaggtcagggtaggtttttraagatggcggccctcaaggctctggtgtccggctgtgggcggcttctccgtgggctactagcgggcccggcagcgaccagctggtctcggcttccagctcgcgggttcagggaagtggtggagacccaagaagggaagacaactataattgaaggccgtatcacagcgactcccaaggagagtccaaatcctcctaacccctctggccagtgccccatctgccgttggaacctgaagcacaagtataactatgacgatgttctgctgcttagccagttcatccggcctcatggaggcatgctgccccgaaagatcacaggcctatgccaggaagaacaccgcaagatcgaggagtgtgtgaagatggcccaccgagcaggtctattaccaaatcacaggcctcggcttcctgaaggagttgttccgaagagcaaaccccaactcaaccggtacctgacgcgctgggctcctggctccgtcaagcccatctacaaaaaaggcccccgctggaacagggtgcgcatgcccgtggggtcaccccttctgagggacaatgtctgctactcaagaacaccttggaagctgtatcactgacagagagcagtgcttccagagttcctcctgcacctgtgctggggagtaggaggcccactcacaagcccttggccacaactatactcctgtcccaccccaccacgatggcctggtccctccaacatgcatggacaggggacagtgggactaacttcagtacccttggcctgcacagtagcaatgctgggagctagaggcaggcagggcagttgggtcccttgccagctgctatggggcttaggccatgctcagtgctggggacaggagttttgcccaacgcagtgtcataaactgggttcatgggcttacccattgggtgtgcgctcactgcttgggaagtgcagggggtcctgggcacattgccagctgggtgctgagcattgagtcactgatctcttgtgatggggccaatgagtcaattgaattcatgggccaaacaggtcccatcctcttcaaaaaaaaraaaaaaaancccgngggggggcccggaaccnaattc

SEQ ID NO: 675 - DNA, 1077 bp, Homo sapiens
  misc feature (523): n equals a,t,g, or c
acccacgcgtccgagagtccaccttgcgaccgtatccgctagcgcggcctgggatgcgcttgggctccctgttcgttcccacatgcagggcagcacaaggagaatgggcgtcatgactgatgtccaccggcgcttcctccagttgctgatgacccatggcgtgctagaggaatgggacgtgaagcgcttgcagacgcactgctacaaggtccatgaccgcaatgccaccgtagataagttggaggacttcatcaacaacattaacagtgtcttggagtccttgtatattgagataaagagaggagtcacggaagatgatgggagacccatttatgcgttggtgaatcttgctacaacttcaatttccaaaatggctacggattttgcagagaatgaactggatttgtttagaaaggctctggaactgattattgactcagaaaccggctttgcgtcttccacaaacatattgaacctggttgatcaacttaaaggcaagaagatgaggaagaaggaagcggancaggtgctgcagaagtttgttcaaaacaagtggctgattgagaaggaaggggagttcaccctgcacggccgggccatcctggagatggarcaatacatccgggagacgtaccccgacgcggtgaagatctgcaatatctgtcacagcctcctcatccagggtcaaagctgcgaaacctgtgggatcaggatgcacttaccctgcgtggccaagtacttccagtcgaatgctgaaccgcgctgcccccactgcaacgactactggccccacgagatcccaaaagtcttcgaccctgagaaggagagggagtctggtgtcttgaaatcgaacaaaaagtcctgcggtccaggcagcattagccatcgtgccctgctgaggggctggctgccttgagtggcctgatcgccacagcccttcttggaagaaaggcgtcygtgtttcaggttccacgcgagtcacctctttcgtcttaatgttcaccgtccacagctttggaataaaccatcctgggaagttraaaaaaaaaaaaaaaaaaaatttgggggggggggccc

SEQ ID NO: 676 - DNA, 920 bp, Homo sapiens
ctgagtggagctcggggctgcgtaggggagctgagccgagyggctgggcgggcctggcskggccagcggaggggagacgtcggttgagcggcggcgaacatgcgcttttgacacattggaggctttcttgatcatggatggtgaagatataccagatttttcaagtttaaaggaggaaactgcttattggaaggaactttccttgaagtataagcaaagggcaacaatagtttcactggaagactttgaacaaaggctaaaccaggccattgaacgaaatgcatttttagaaagtgaacttgatgaaaaggaatctttgttggtctctgtacagaggttaaaggatgaagcaagagatttaaggcaagaactagcagttcgggaaagacaacaggaagtaactagaaagtcggctcctagctctccaactctagactgtgaaaagatggactccgccgtccaagcatcactttctttgccagctacccctgttggcaaaggaacggagaacacttttccttcaccgaaagctataccaaatggttttggtaccagtccactaactccctctgctaggatatcagcactaaacatcgtggggggatctcttacggaaagtaggggctttagaatccaaattagcagcttgcaggaattttgcaaaggaccaagcatcacgraaatcctatatttcagggaatgttaactgtggggtgctgaatggcaatggcacaaagttctctcgatcagggcatacatctttcttcgacaaaggggcagtaaacggctttgaccccgctcctcctcctcctctgggcagctgtataggatcatcatgtggttacaaaaaatacttccctcaaaaaaattcttttaatgtggaaacaataaatttcacagaaaaaaaaaaaaaaaaaaaa

SEQ ID NO: 677 - DNA, 1247 bp, Homo sapiens
caaatgactggttctttaactcctacctttctctcctctcttcctgtaatgttgttactgaaggcaggaagggagactccttggctaaagagcagagcaagagcctcaaagtggtctttgtgagccaccctggactactggttcagtagagggttgagtcaagcaatatttgaggacgggatataaacagtatttcttaaagttgtcaccaatttttcccccgatgaggccattccagacccaaattagtcataacagagccaggacaataatcacatctcctgattctgagcctgaatgcttcccacaggactgcgtcgctcccaatgctctgaggtccattgtgggggaaagttgccactgggattccacctcaaggcctggggaccaagcctccaggattcctcttgagactcctccactatttcattaccatcccgccacatcttctagtgctatgccctggttccctttggaatcctctcaatcccaaagaaggcctcctaccacctctaaggcatcaaaggtgttagaaagtgccccaagactcaacagggcatccatctcatcatagaagacactggtgcctggtgtgtaggtgctcctggctttgcagtagtcggtcaggaggtttttgaaccgatagcaacattgctccagggtccacaggaagccatgttctcacagctgctcagccataatccggtacacctggtggtttcgatggcaggtgcggagtttttcgtggatccargcctctgagaattcccagaaaaatcttggtttctttgtatcccagtgcactcctgccaccttctcatcctccagggcctgccactccagctcgctccaggtyttggcttttctccagattagcacctggccagacttgactctcaccccagccactgagcagtctttcacactctctttttctccagaatttgaagatctagatgctgtgggttttmatcctactccacgtgggagttcactttgggcctatggattggaaaatctgtttgcaggcagacaaaagggagatgtaatggtttggtaaatctaatcccaaccattttatatgccagrgagaggagatagtaatttttttttttaattctggggggattcttgggaaagctcagtgaaaagaacaactagaaaaaaaaattcaggcccaaatgcataactatatatccacgttcatctatcttaaataaaaytcagacacatacctaaactgaaaa

SEQ ID NO: 678 - DNA, 2667 bp, Homo sapiens
  misc feature (2602): n equals a,t,g, or c
cagtstggttggagctgttgtcttgtatgctcagcgaggcccggagagacccgggagagagctaggccgagtccaccgcccgagtctgctgcccgagcccgcgttacgcacaaagccgccgatccccggcctggggtgagcagagcgaccaccgcccgggagcagcgcggcgagacgcacggtgcgccctatgcccccgcgcccccaccgcccccgccgcggcagccgaagcgcagcgagagaacgcgccaccgcggggcccgggtgcagctagcgaccctctcgccacctgcgcgcagcccgaggtgagcagtgagcggcgagcgggagggcagcgaggcgttcgcgggccccctcctgctgcccgggcccggccgctcatggcggccatccgcaagaagctggtggtggtgggcgacggcgcgtgtggcaagacgtgcctgctgatcgtgttcagtaaggacgagttccccgaggtgtacgtgcccaccgtcttcgagaactatgtggccgacattgaggtggacggcaagcaggtggagctggcgctgtgggacacggcgggccaggaggactacgaccgcctgcggccgctctcctacccggacaccgacgtcattctcatgtgcttctcggtggacagcccggactcgctggagaacatccccgagaagtgggtccccgaggtgaagcacttctgtcccaatgtgcccatcatcctggtggccaacaaaaaagacctgcgcagcgacgagcatgtccgcacagagctggcccgcatgaagcaggaacccgtgcgcacggatgacggccgcgccatggccgtgcgcatccaagcctacgactacctcgagtgctctgccaagaccaaggaaggcgtgcgcgaggtcttcgagacggccacgcgcgccgctgcagaagcgctacggctcccagaacggctgcatcaactgctgcaaggtgctatgagggccgcgcccgtcgcgcctgcccctgccggcacggctccccctcctggaccagtcccccgcgagcccggagaaggggagacccgtgtcccacaaggaccccaccggcctgcctggcatctgtctgctgacgcctctggcttgcgccaggacttggcgtgggcaccgggcgcccccatcccagtgtctgtgtgcgtccagctgtgttgcacaggcctgggctccccactgagtgccaagggtcccctgagcatgcttttctgaagagccgggcctcagagtgtgtggctgtgtgtctgttcgactcccctcgccccattttcaccccacccccgcctctgatccccgggggcgagattggcgcgggagtgtggccgcgccccatcagatgttckcccttcaccagcgggagcttgatatcccttgtctgtaacatagaccccgggtactgcgggaggggagggctgctggggaggatggggggatgttatataaatatagatataattttattttcggagctaagatggtgttatttaagggtggtgatgggtgagcgctctggcccaggctgggcmagactcccgcccaagcatgaacaggacttgaccatctttccaacccctggggaagacatttgcaactgacttggggaggacacagcttcagcacagcctctcctgcgggccagcccgctgcgaaccctccaccagctaccggagggaggagggaggatgcgctgtggggttgtttttgccataagcgaactttgtgcctgtcctagaagtgaaaattgttcagtccaagaaactgatgttatttgatttatttaaaggctaaaatttgtttttttattctttgcacaattgtttcattgtttgacacttaatgcactcgtcatttgcatacgacagtagcattctgaccacacttgtacgctgtaacctcatctacttctgatgtttttaaaaaatgacttttaacaaggagagggaaaagaaacccactaaattttgctttgtttccttgaagaatgtggcaacactgttttgtgattttatttgtgcaggtcatgcacacagttttgataaagggcagtaacaagtattggggcctatttttttttttttccacaaggcattctctaaagctatgtgaaattttctctgcacctctgtacagagaatacacctgcccctgtatatccttttttcccctcccctccctcccagtggtacttctactaaattgttgtcttgttttttattttttaaataaactgacaaatgacaaaatggtgagcttatgatgtttacataaaagttctataagctgtgtatacagttttttatgtaaaatattaaaagactatgatgatgacatttaaaaaaatggctcttgtggtttaatagtgtgtaaaaatacccttgtgaatttggaacaagggagatattctcctaggcgagrtcctttcttgcccaactccgtttcccttatrgcaaatgtagtaaatgaggrtgaagtccctttgagrgcatgtgggggttgggtgaccaagggagaccrggttgttcctgtcacattcctagaggaagatgagtggataccccgacacccagtgcaaaaacttttgncctattatgtactcagttcaattgggtgagaccgaagatcttgatttcattcatctgtgtgtctt

SEQ ID NO: 679 - DNA, 952 bp, Homo sapiens
gtaccggtccggaattcccgggtcgacccacgcgtccgcggtacgcgtgggcggacgcgtgggcgcgaggggcggagcttgtggaggaagatggctgccgcctgggggtcgtccctaacggccgcgacgcagagagcggtcactccctggccgaggggcaggctcctcacggcctccctgggaccccaggcgcgtcgggaggcgtcgtcctccagccccgaggccggcgaagggcagatccgcctcacagacagttgcgtccagaggcttttggaaatcaccgaaggktcagaattcctcaggctgcaagtggagggaggtggatgctccggattccaatacaaattttcactggatacagttatcaaccccgacgacagggtatttgaacagggtggggcaagagtggtggttgactctgatagcttggccttcgtgaaaggggcccaggtggacttcagccaagaactgatccgaagctcatttcaagtgttgaacaatcctcaagcacagcaaggctgctcctgtgggtcatctttctctatcaaactttgatgtgatgactggtgactctgggattgtcaccagttgtaccaatttgaagaacctggaattagtagaattctagaagtttacttctaatcatgtccctctcaattttatttcccgcagtccaggagtgttatgttttgccactattattttcagaatgtgaagattttactcttggcttaatttttccctccactcagtgctaaggctgagcctccagatgctgttacctcagatttaatcactggttgaaactccgtataatctgtagagcctccatggctctaaaatttggaattaacttctcttgccttaagagctgcttgtacatatgtggatagctatgtataaaagcttcattttaaaaaaaaaaaaaaaaaaaaaaaaaaaaaaaaaaaaa

SEQ ID NO: 680 - DNA, 2309 bp, Homo sapiens
  misc feature (4): n equals a,t,g, or c
gcangccccgsgggggccgccagcaccacccgccctaccaccagcagcatcaccaggggcccccgcccggcggcccggcggccgcagcgaggagaagatctcggactcggaggggtttaaagccaatttgtctctcttgaggaggcctggagagaaaacttacacacagcgatgtcggttgtttgttgggaatctacctgctgatatcacggaggatgaattcaaaagactatttgctaaatatggagaaccaggagaagtttttatcaacaaaggcaaaggattcggatttattaagcttgaatctagagctttggctgaaattgccaaagccgaactggatgatacacccatgagaggtagacagcttcgagttcgctttgccacacatgctgctgccctttctgttcgtaatctttcaccttatgtttccaatgaactgttggaagaagcctttagccaatttggtcctattgaaagggctgttgtaatagtggatgatcgtggaagatctacagggaaaggcattgttgaatttgcttctaagccagcagcaagaaaggcatttgaacgatgcagtgaaggtgttttcttactgacgacaactcctcgtccagtcattgtggaaccacttgaacaactagatgatgaagatggtcttcctgaaaaacttgcccagaagaatccaatgtatcaaaaggagagagaaacccctcctcgttttgcccagcatggcacgtttgagtacgaatattctcagcgatggaagtctttggatgaaatggaaaaacagcaaagggaacaagttgaaaaaaacatgaaagatgcaaaagacaaattggaaagtgaaatggaagatgcctatcatgaacatcaggcaaatcttttgcgccaagatctgatgagacgacaggaagaattaagacgcatggaagaacttcacaatcaagaaatgcagaaacgtaaagaaatgcaattgaggcaagaggaggaacgacgtagaagagaggaagagatgatgattcgtcaacgtgagatggaagaacaaatgaggcgccaaagagaggaaagttacagccgaatgggctacatggatccacgggaaagagacatgcgaatgggtggcggaggagcaatgaacatgggagatccctatggttcaggaggccagaaatttccacctctaggaggtggtggtggcataggttatgaagctaatcctggcgttccaccagcaaccatgagtggttccatgatgggaagtgacatgcgtactgagcgctttgggcagggaggtgcggggcctgtgggtggacagggtcctagaggaatggggcctggaactccagcaggatatggtagagggagagaagagtacgaaggcccaaacaaaaaaccccgattttagatgtgatatttaggctttcattccagtttgttttgtttttttgtttagataccaatcttttaaattcttgcattttagtaagaaagctatctttttatggatgttagcagtttattgacctaatatttgtaaatggtctgtttgggcaggtaaaattatgtaatgcagtgtttggaacaggagaatttttttttcctttttatttctttattttttcttttttactgtataatgtccctcaagtttatggcagtgtaccttgtgccactgaatttccaaagtgtaccaatttttttttttttactgtgcttcaaataaatagaaaaatagttataatattgatcttcaactttgccattcatgcttctatgcatattaggctacgtattccacattgaaagcatgagagtgtctaggcctttgaatggcatatgccatttctgggaaatgcatctggaggctaagtattgctttctacaaataattgccccctttgttttaaaaagaagaaatgcatattgaagtagtttgatgatttgtttggcatataggaagcacgctggtgctaagtattttttaaatggttatgtaagcaaagctgaactgtaaatcttcaggaatatgtattaagattgtggaatgggtgtaagacaattggtagggggtgaaagtgggtttgattaaatggatcttttatggccctatgatctatcctttacttgaaagcttttgaaaagtggaaaggtcattttgttgcatttccccatttcttgtttttaaaagaccaacaaatctcaagccctataaatggcttgtattgaacttttacatttgaattaaagatgttaaacatgaaaaaaaaaaaaaaaaaaaaaagggcsgccgswcgcgatgctagaac

SEQ ID NO: 681 - DNA, 451 bp, Homo sapiens
  misc feature (370): n equals a,t,g, or c
  misc feature (419): n equals a,t,g, or c
  misc feature (428): n equals a,t,g, or c
aggcccctgcccccacttcttgcagcctcaaaccctgcattgggcatcctgtcccctcttcaggttattcctgtcacgtggggccaaccctgagctgcggaacaaagagggggacacagcatgggaacctgactcccgagcgctccgacgtgtggtttgcgcttcaactcaaccgcaagctccgacttggggtgggaaatcgggccatccgcacagagaagatcatctgccgggacgtggctcggggctatgagaacgtgcccattccctgtgtcaaggtgtggatggggagccctgccctgaggattacaagtacatctcagagaactgcgagacgtccaccatgaacatcgatcgcaacatcacccanctgcagcaatgcaagttgttgttggaacgaattgctctaagcttccaanttgcctgtnccgggccaagcttcaagcaatcc

SEQ ID NO: 682 - DNA, 1298 bp, Homo sapiens
  misc feature (1294): n equals a,t,g, or c
agaggtttgccatggtggtcatcgcggasccctgcagtcctggmagccgccgcgggaggctgaatccctgcarcccatgacggtggtgggtacagactacgtgttccacaatgacaccaaggtcgtcttcctgtccccggctgtgcctgaggagccagaggcctacaacctcacggtgctgatcgagatggacgggcaccgtgccctgctcagaacagaggccggggccttcgagtacgtgcctgaccccacctttgagaacttcacaggtggcgtcaagaagcaggtcaacaagctcatccacgcccggggcaccaatctgaacaaggcgatgacgctgcaggaggccgaggccttcgtgggtgccgagcgctgcaccatgaagacgctgacggagaccgacctgtactgtgagcccccggaggtgcagcccccgcccaagcggcggcagaaacgagacaccacacacaacctgcccgagttcattgtgaagttcggctctcgcgagtgggtgctgggccgcgtggagtacgacacacgggtgagcgacgtgccgctcagcctcatcttgccgctggtcatcgtgcccatggtggtcgtcatcgcggtgtctgtctactgctactggaggaagagccagcaggccgaacgagagtatgagaagatcaagtcccagctggagggcctggaggagagcgtgcgggaccgctgcaagaaggaattcacagacctgatgatcgagatggaggaccagaccaacgacgtgcacgaggccggcatccccgtgctggactacaagacctacaccgaccgcgtcttcttcctgccctccaaggacggcgacaaggacgtgatgatcaccggcaagctggacatcccygagccgcggcggccggtggtggagcaggccctctaccagttctccaacctgctgaacagcaagtctttcctcatcaatttcatccacaccctggagaaccagcgggagttctcggcccgcgccaaggtctacttcgcgtccctgctgacggtggcgctgcacgggaaactggagtactacacggacatcatgcacacgctcttcctggagctcctggagcagtacgtggtggccaagaaccccaagctgatgctgcgcaggtctgagactgtggtggagaggatgctgtccaactggatgtccattytgycaccaatytgacaaggcgatgacscttcaggaagcccaagccttctgggtgcccaascgcttgcaccatgaaaaacgcttgacggaaaccgactttactgtgancccc

SEQ ID NO: 683 - DNA, 859 bp, Homo sapiens
  misc feature (420): n equals a,t,g, or c
  misc feature (793): n equals a,t,g, or c
acccacgcgtccgctgcaacttgagaaggtcacggctgaggccaagatcaagaaactggaggatgagatcctggtcatggatgatcagaacaataaactatcaaaagaacgaaaactccttgaggagaggattagtgacttaacgacaaatcttgcagaagaggaagaaaaggccaagaatcttaccaagctgaaaaacaagcatgaatctatgatttcagaactggaatgcggctaaagaaggaagagaagagccgacaggagctggagaagctgaaacggaagctggagggtgatgccagcgacttccacgagcagatcgctgacctccaggcgcagatcgcagagctcaagatgcagctggccaagaaggaggaggagctgcaggsggccctggccaggcttgacgatgaaatcctncagaagaacaatgccctgaagaagatccgggagctggagggccacatctcagacctccaggaggacctggactcagagcgggccgccaggaacaaggctgaaaagcagaagcgagacctcggcgaggagctggaggccctaaagacagagctggaagacacactggacagcacagccactcagcaggagctcagggccaagagggagcaggaggtgacggtgctgaagaaggccctggatgaagagamgcggtcccatgaggctcaggtccaggagatgaggcagaaacacgcacaggcggtggaggagctcaagcaacgagctggccacagagcgcacacgggcccagaagaatgagagtgcccggcagcancttcgagcggcagaacaaggagctccggagcaagctcccacgagattggagggggccgtcaagtcc

SEQ ID NO: 684 - DNA, 1251 bp, Homo sapiens
  misc feature (1249): n equals a,t,g, or c
ggcacgaggagcctctcctacaagatgactcataagcccagtgtggggtaatatacagaggtccaggagcgtgcctcttttcccctctgggcttgtgttgggtggcatttgggcacgagggcctcttctagccctcctagctagcttcaacatcataagcgtcttgaacgcagagtgttacctgaaacagattttacatcctacttctcattttacagtttcagagactcctccactctctgggaatgacacggactccctctcctgcgacagtggcagttcggcaactagcactccgtgtgtgtcccgcctggtcactggccaccacctgtgggccagcaagaatggccgccatgtcctgggcctgattgaggactatgaggccctgctcaaacagatcagccagggacagaggctccttgctgaaatggacattcaaacccaagaggctcccagctccacaagtcaagagctgggaacaaagggtccacacccagcaccactgagcaagtttgtgagcagtgtgagcacggccaagctgaccctggaagaggcctacaggcggctgaagcttctctggagagtctcactccccgaggatggccagtgcccccttcactgtgagcagattggagaaatgaaggcagaggtcaccaaactacataaaaaattgtttgaacaagaaaagaagttgcaaaacaccatgaagcttttgcagctgagcaagcgccaggaaaaagtcatctttgatcaattggtcgtaacccacaaaatccttcggaaggccagaggaaacctggagcttaggcctgggggagcccatccaggaacatgcagtcccagcagaccaggctcctgagaagaactttcagccaataaagcttgtgcttcccccaccgagctcacgctgtctctttgttccaagtgtggttcctatttattgaggaagaaagagctgtctggccaaaggaaatctattttttcccttcatgttttctctctgaaagttggcttgagagttgttgtcagaaaggtgcaggtgctccacaaacgggtggtaaaaaggcctcgagctcttggatgttgtatttcagatcaggggcaggcaccggagttgaggctgtgcgccttggtgggcttcacgtcttcccctggatttgcttagtactcagccagtgccacagtttgaagattctcattaaatgattcatttcatttcaaaaaaaaaaaaaaaaaaaaaaaaaaaaanta

SEQ ID NO: 685 - DNA, 2600 bp, Homo sapiens
  misc feature (38): n equals a,t,g, or c
  misc feature (57): n equals a,t,g, or c
  misc feature (476): n equals a,t,g, or c
  misc feature (1905): n equals a,t,g, or c
cgcaacctatgcaagggtggtccaaaaagcccaagctnaagccaagctgcctcccgnactcccatcgaccccagggtgcaagaggacgtggtgaatggcgttttccccaggtcggaagacggaaagaccggaggcagtagctgcaaagcccttggaaacaccctggatgctgttgagggccaagagatctgtgtggctcctgggccggctgagtggcagcagccccccttgccccacctcccccttcccctacccaaccctgccctgccccaccccacctcacagctactcagtggggctggcatcaagggagacaccagtggtgcgtttataattggcttaaagggatggacttgtgattggctgcaggaagaaacttttttattttttaaatcttgaccaacagaaaccttttatttttatttctgactcttattttttaaaaaatttgcgcctcggtatctggcttccctggnaactctccgagctctggtgctttagttaggtcatttttttagaaatgtgaagaggtctgattggctgcttaaactggaaagggactgtgattggctggttaatgggaaacggtttttttctttggctgcaggtgttctgctgatatcaacagcttccctattttgaatgcagaaaacagggtctgggacattagtcgttatatttgacttgaaaagaaagaaaccaagtgcgctttgcaatatttattacacaaagaacttgctgctgccttcacatttggggtttgtgtttgattggctttcgatgcgtgtgtttggtttcccattggttcacctgtgactcctgttgccatggattcacccccctctgctgccggctctgggcctgagggtccacctggagagtacatttgctttaatgagtgcacctgcctccaccagcaaggggaccccgagaaccctgagcagggtccacagctggaaagttgggcccctgaggagctttgtgtcgtcttgaacgagcagcccagggcctagaggtaaccgttagcgggatttatgtgcactgcctgcatgagctggcaaccagccacgtcccttggtgagaaagggattgctgaggcaccgtccaggccccaccggccaggccgcgcccagcagaggcgtactacccagctctgtcctcttggccatccttctgtgtaccacttcctgaggcctcattttgggggtcatcttggaaaggggaggagcttctcccagtgtgagaccccaaagactctggaggtcatctggcggaggtctctgggagcccagaacccacataaaagccccagcttggcttcacaaggcccagggagacctccagctaaacaccaacccctgacctaccccagccaggctcctacctgtytgctgccagcacagtaggtcccggccagctctggagttctctcatcggaggcccatgccctccactccactgcctttggaagggtctctctccaggtcagcctggaagggacagtatcgtttgtttatgaaatgccactgggacagctggctgggccttcaccaagcaagtcccttcagactggcccttaagccaaactcaggcccagaattgcagttcagaatggcagtcctggaggcagggggtgaggggcaggtctagtgttcctgcaccaaacctaagtccttccacctgccacccccttccctgggagggaggtggtcctcctatctccctggctcactggcaggtgtgggatctggggagagcggctggagaaagatgcagtcctcaggaagggggccgccaccctcccctatgctggtagatgctgaggcccctaggtgcccagggccagtgggaccctctcagaaccaaatctttcccctttctcggggcttggggctcgggccgtangggctcctgagtgtcatgaagtgcacaggagccaaatgaccgagccctggagagccccatggtgggtaggtggttcgtgctgtgctctggcaccatcagcctgttccagaaggaggattcgagcatcaggctaagaccctgtgtcctccaccatgcactcacccctagccctggttagctgacagtcagctgtggggaacacagctacaaccctaccctggcagggacctgagagcatctcaggaggggcagcgcatgtgtgcatgtgctgtgtgagtgagcacacccgtgtgcacactcatacacatgtgcacacacacgcactctccccrctcaggggcctggaggtctggctgagcccctggggaaaggtgagttctttcatctccctcctccaggtcggagtgcctggagtcaggtgtcgaggccacattgctggctgccccctctttgtagctcctataaagggcccacacctggtggatacctggttgagcgtgtggtctctgccccagcctgtccttgtcacgatcacaggccttgcttttgtaacaatgatgaccccggcctgtctcatcttctgaagaggaaaagtcaaagtgttgctgtggctccatatttcaactaaaaatatatctgttggagaaagaaattaacaataaagaattttcataggttaaaaaaaaaaaaaaaaa

SEQ ID NO: 686 - DNA, 4641 bp, Homo sapiens
cagcagcgggatggccctagcagtggcggcggstgcagaagcccaagcagcgcggccgcagtggaggctagagccggagcggcggcggcggcggcaccccggggagtttaagatggcggcgggggggacagggggcctgcgggaggagcagcgctatgggctgtcgtgcggacggctggggcaggacaacatcaccgtactgcatgtgaagctcaccgagacggcgatccgggcgctcgagacttaccagagccacaagaatttaattccttttcgaccttcaatccagttccaaggactccacgggcttgtcaaaattcccaaaaatgatcccctcaatgaagttcataactttaacttttatttgtcaaatgtgggcaaagacaaccctcagggcagctttgactgcatccagcaaacattctccagctctggagcctcccagctcaattgcctgggatttatacaagataaaattacagtgtgtgcaacaaacgactcgtatcagatgacacgagaaagaatgacccaggcagaggaggaatcccgcaaccgaagcacaaaagttatcaaacccggtggaccatatgtagggaaaagagtgcaaattcggaaagcacctcaagctgtttcagatacagttcctgagaggaaaaggtcaacccccatgaaccctgcaaatacaattcgaaagacacatagcagcagcaccatctctcagaggccatacagggacagggtgattcacttactggccctgaaggcctacaagaaaccggagctacttgctagactccagaaagatggtgtcaatcaaaaagacaagaactccctgggagcaattctgcaacaggtagccaatctgaattctaaggacctctcatataccttaaaggattatgtttttaaagagcttcaaagagactggcctggatacagtgaaatagacagacggtcattggagtcagtgctctctagaaaactaaatccgtctcagaatgctacaggcaccagcckttcagaatctcctgtatgttctagtagagatgctgtatcttctcctcagaaacggcttttggattcagagtttattgatcctttaatgaataaaaaagcccgaatatctcacctgacgaacagagtaccaccaacactaaatggtcatttgaatcccaccagtgaaaaatckgctgcaggcctcccrctgccccctgcggctgctgccatcccyacccctccaccgctgccttcaacctatctgcccatctcacatcctcctcagattgtaaattctaactccaactcccctagcactccagaaggccgggggactcaagacctacctgttgacagttttagtcaaaacgatagtatctatgaggaccagcaagacaaatatacctctaggacttctctggaaaccttaccccctggttccgttctactaaagtgtccaaagcctatggaagaaaaccattcaatgtctcacaaaaagtccaaaaagaagtctaaaaaacataaggaaaaggaccaaataaaaaagcacgacattgagactattgaggaaaaggaggaagatcttaagagagaagaggaaattgccaagctaaatwactccagtccmaattccaktggaggagttaaagaggattgcactgcctccatggaaccttcagcaattgaactcccagattatttgataaaatatatcgctatcgtctcctatgagcaacgccagaattataaggatgacttcaatgcagagtatgatgagtacagagctttgcatgccaggatggagactgtagctagaagatttatcaaactagatgcacaaagaaagcgcctttctccaggctcaaaagagtatcagaatgttcatgaagaagtcttacaagaatatcagaagataaagcagtctagtcccaattaccatgaagaaaaatacagatgtgaatatcttcataacaagctggctcacatcaaaaggctaataggtgaatttgaccaacagcaagcagagtcatggtcctagaactctgcttggaccagaagatgtgaataaacttaagcttatttatttaaaattccaaatgagttgctctagattctaaaaaggtgaaactttggctgttgaaagtttcagtattagtaaacttgagttactttttcttttccattttactttgcttccctgcatttcgaagctgctctttctggtcctccccaccaccccacccccaagacttgtgtttgttaatagaaataatttttttaggtattggggatccattgtctatatttcaaatcagttttttttcctcaaaaacttgtgtttgttattagaaatgattttttagatattggggatccagtgtccacacttaaaagttgtatgtgtttaaaaaacaacaacagtaatgtgcaaggtgaaatgcttttggataaacgtaagcctattttctgacgtttcttaatgcaaactctttgccttaaatggtagaatatttagaaatttgcacaaaattaaaaaaataaacattgtcttggagggttaaaaaatagaaaggtgtatgtgtatagattcacatacacatatgtatatacaggctgacttgatctagaacattaaatccgccctgcaagttaaccccccattgcaatggttgccttaaggtgtttgctagttgtgtacatagtgtggttaatcattagctacactgcttcccacttgattagagcaatgggaagcatactgtggcctaccagcatctggaagtgtgtgctcgatctgtatgtgtgcagaggtggtgtggatgtgagcgtgcatgaaggaaaaaaagctgctactcctagtaggccaaacgctcaggttaaacaactgacgagtgttactgtagggtgtttttttgtttttttgttttttttcttctatcaaattgctacttttgttgtggaagacaaaagcatttccatttcaacgagtttgtcagctttattaatgttgggcaaaaattgatatgtcatgaaaatgaaacagatctatagttttgggacaaaattataaaatgaaatgtgtaggtaacctatttatatactgctataaagtattttttgaagagagatatgcaaagaagctattacctacataagaggtatatttaaagattttttttttcatcctggtgccaggaatataaaaaagagtggatatatttaaccataacatactgtgattcatcaaacagcacaaactttcatttcatggagtttatctgttgacattgatttaaactgtcacttgttttatcatgtgggaacataagttatgtggtcaaaaatataaggattttgaattaatgttgattcaagttgtattgtcttattgtattgtcttttcaaagtgctgccagttgaaaagggaagcattatgtttacaaatctgttttgaaatgtttgccaaaattttggtagtgtctttaataaagatgtttgtctccagcatccagaaaaataaatgaataactttgttgtgtatcactgtaaaccagaaaaatgttggttatctagaaaacttgagagagcatgtagattaacttttctctttggagttctaaaacattaactggaaagattagataatatactaaatgtatacagaagtatacagactatacaaagactgaaacaagtcccttttgcactacaactctataacattaccgcagaaattttggttctatgtagcatggacctcctaaggaattctgtttcttttagcattgagatccctggtgctctttttttacctcagaattggtacaatcattattaaacgttaatttatttcaaactttttaattgaaaaaaggaaagggaaacttaattggggataaattcaggcatcatattattatgatagagtctcctgagtggttcgtctataggtaatgaactcattggtgttatttcttggacatcttggccttttaatcaaagactgtgtgctgctatttgctatgagcaaggtttctcaaaagcaaaaggtgcttggaccatttggatcacctgagttagaatctctaggtatagggcccargtatctgcattttcacaggtttcttgtaggtgactttctgcaagctaaagtatgagaaccattggcttggatgtagttctaaacttttaggtctgtaaatcttgaaatcttgaactgaaggtcaactattggctttttttttttttttaatgtccatcatgtcagcaggtgcaaatcacttttcccctttgcatgatctgaggcacctcctcagttgtttcactgccaactcttrtttcagaacctgtttacaaacaagccttccagttggtgaatggttagccattggagctcctaccctgtacatcagcacatcttctggtttacaagttgggtaacaatgaaagctggagatrctaaatggaaatccagcattgcatacccttagacctgatcacataccagtaaaagccttaatttagatgttagttgtatgtgwtggacagatccttgcaaaagtgtgctgtctattagttgtaaattttgaaaatcataaatctctgaatctgctactatccaagtttcatcccttttgaagacta

SEQ ID NO: 687 - DNA, 400 bp, Homo sapiens
  misc feature (370): n equals a,t,g, or c
  misc feature (380): n equals a,t,g, or c
cggtccttgggggggctttgagctctccagactgtgcccttaccgccttccccgccacacccgctctgtcttcccactgtcccccccatcccgggcagggcccagtgggattgagggggctgggtcccccaggacacgggcccagaagagccccacgggttcctgcatcttccamcgcaccatacctggagccctccgaggggtgtcaggggaaacaggccaccgccaaagccatggcccgccgccgaaagcccaggccccacccgcacctcctcacccatccagcctgacccacgcggcctctcctcctccttgccgctgtktggggcartcccctgtccgccccaaaaccggcttggtccctggccangcttgaaaanaatttgggcaaggaaaaggc

SEQ ID NO: 688 - DNA, 2751 bp, Homo sapiens
  misc feature (528): n equals a,t,g, or c
acccacgtcgtccgccacgcgtaccggtcctacttcacttttattggaagagttgctggtctggccgtatttcatgggaagctcttagatggtttcttcattagaccattttacaagatgatgttgggaaagcagataaccctgaatgacatggaatctgtggatagtgaatattacaactctttgaaatggatcctggagaatgaccctactgagctggacctcatgttctgcatagacgaagaaaactttggacagacatatcaagtggatttgaagcccaatgggtcagaaataatggtcacaaatgaaaacaaaagggaatatatcgacttagtcatccagtggagatttgtgaacagggtccagaagcagatgaacgccttcttggagggattcacagaactacttcctattgatttgattaaaatttttgatgaaaatgagctggagttgctcatgtgcggcctcggtgatgtggatgtgaatgactggagacagcattctatttacaagaacggctactgnccaaaccaccccgtcattcagtggttctggaaggctgtgctactcatggacgccgaaaagcgtatccggttactgcagtttgtcacagggacatcgcgagtacctatgaatggatttgccgaactttatggttccaatggtcctcagctgtttacaatagagcaatggggcagtcctgagaaactgcccagagctcacacatgctttaatcgccttgacttacctccatatgaaacctttgaagatttacgagagaaacttctcatggccgtggaaaatgctcaaggatttgaaggggtggattaagcaccctgtgcctcgggggtggttgttcttcaagcaagttctgcttgcacttttgcatttgcctaacagacttttgcagaggcgatggcagagagcagctgcaggcatggtccctggagccgagccttcaccacgcactcgtccaagttcggatgcgggaacctggtcccagcttgagttcctgcctttcccaccacaaattatcaactggttgatgtgtacactaattacatttcaggaggacttaatgctatttatgttgtgcctctgcagcaaagcccttaataaatattttacatcctttctaatgacaatgaatggaattaatcactcaacaggtatagtattacgactcatgtttactttttaaaatgatttagaccgattttcagattttatttcgttatgattaaagatgtctcatgtacttggaaaagtgagcatttttttttttttttktatttcactttcataccaggcttaatgtcaatgacatttttatttttgaagtactctgacacctccaccctctactttattagaattggaaggcaaatttttgtccaaaaacctacagacaagtactttgagagaatttccaatataatattagacataatgataattttttccatactcagaatgaaaaactggatattacgtttttkttttggggtttttttgtacaaatttagctaatagctacaggctgagagaattgtaacatagcatgacaaattttgtgttgacttgaaaggaatcacaccattattccttagaagtaattacatgtgttctaacacatttgagacagggttggactcccatttctcatccgagaaattacttaacccttcctgggcgctgtacagtcatcttttattctatttcctctttgctgtttgtagtagagacattttgaatgaaacttggcactgcttgattcaaaactgtggaaaccagatctgtttagtctcctgtttgtatgcgtttgctaatggtagctaaataaccagtttttgttgtaaatgcaccaattctgaaggcactttatgtactacatggaggtcatatctggttttgtttttatttttttatcatgaacattaaatgtgatgatgatttcttttccctgcacacatctttccggtgcaatatctatcaattgtgaatctggctgctggtgtataaaaacctggatgtaaagctgagcctacagacctgtcctcaccaactgttttgtgatttctactcaactacaaagatttatttaatgtactcttaatctaactgagttttgttaccaatgacctgttgcatgcttcaataccgtgtactgcctgagttgtgcctcttgtgtgctagattaaaagtgagacagagacttgacttgatcctctgagctcaagctattgagctggtagtggcagaggactgagggtacctgcacagtttgattcttttccacgtgtaagtctccattgcagaattgtcgtgctttgagaaaacacctgaggcagtgtgggagttgaacgaccctgctgtcctttttaacctgtgttgtcctagamcctgtcggggcagtcaggggacactagagatttgatctcatgcgagtcatcaataggacaaaaaagttgtggtttggggaggtctgtttgttacataaaaaggacctttcggtgtaagaaattgccgtttttaccctgccctggctggcatgtgagaagccatggaaggttgtggttgtaaatgagttgtctaaaggggtgcagaggcctgaggtttctaaaagaaggtagatttctacagagctgagtgttggttcctttttcttattggttgaaaattacctggtagtgatcagaaaacttagatgctatgtaactaaaaaaaaaaaaaaaaaaaaaaaaaaaa

SEQ ID NO: 689 - DNA, 969 bp, Homo sapiens
caggcgcagtcggcggtcggcrtggggggcgctatgcggggcggcacgtttctcgagtccgggcattgtacaagcgcgtcttgcagctgcaccgtgttctgcccccggacctcaaatccctgggcgaccagtacgtgaaagacgaatttaggagacataagaccgttggttctgacgaggcacagcgtttcttgcaagaatgggaggtgtatgcaacagcgttattgcaacaggctaacgaaaacagacaaaattcaactggaaaagcatgttttggcaccttcctcccagaagaaaaacttaatgactttcgtgatgaacaaattggacagttgcaggagctgatgcaagaagccacaaaacccaataggcaatttagtatttctgagtctatgaaaccaaaattttagtctatacaacaaagcttaataagacatgcaaaaatttagaacccctactttaactgtcattggtttttgaaatatatttaagctttgaaaacacctgttattaatgaaatactcttttattttggatattatgattgcagtatatggatcaagatcactagtgacaattgaaaaaaactattggaataatagcacttgtataaaattcagttttggaactaaacagcaaatttctagaattttgctgaaaatgttttaaaatgctattctcatccagccatattagtcttctggcttttctttagcttcatcaaataagcatgttgtgataatgatagatgtacaattccaacaaggttattattttttaaatacattgtcattytgaacattttatcacttctagtttaataatacatacatgatttttcttctgaatgtctcttctccctgcatcactgttcattcacaatgaaaggttaggaagaagctttaaaattcactattttactatcaatcatttgtataataaactatacaaagtataaaaaaaaaaaaa

SEQ ID NO: 690 - DNA, 979 bp, Homo sapiens
  misc feature (376): n equals a,t,g, or c
  misc feature (943): n equals a,t,g, or c
  misc feature (945): n equals a,t,g, or c
  misc feature (957): n equals a,t,g, or c
  misc feature (959): n equals a,t,g, or c
  misc feature (969): n equals a,t,g, or c
tgtgcctgcgttcgggaagggcagactgtgtaccagcaagtcctgtccctgggagcgcccaagtgtcctccgcagctggaactggggcctgtgtgggtactttgctttctaccatgccctctatccccgagcctggactgtctatcagcttcctggccagaatgtcaccctcacctgccgtcagatcacacccatcttgccccatgactaccaggacagcagcctgcctgtaggagtctttgtgtgggatgtggaaaatgaaggggacgaagctctagatgtgtccatcatgttctccatgcggaatggactgggtggtggagacgatgccccagggggtttgtggaatgagcccttctgtctggagcgtagsggnggaaactgtccgggggctgctcctgcatcatccaacccttccaaacccctacacgatggctgtggctgcacgagtcacggcagctaccacggtaacccacatcacagcctttgaccctgacagcacggggcagcaggtgtggcaggatctacttcaggatggacagctggactctcccactggccaaagcacccctacgcagaaaggagtaggcattgctggagctgtgtgtgtttccagcaagttgcgacctcgaggccagtgccgcctggagttttcactggcttgggacatgcccaggatcatgtttggagctaaaggccaagtccactacaggcggtatacaaggttctttggccaggatggagatgcagcacctgccctcagccactatgcactgtgccgatacgcagagtgggaagagaggatctcagcttggcagagcccggtattggatgacagatcactgcctgcctggtacaaatytgcgctgttcaatgaactatacttcctggctgatggaggcacagtgtggctggaagttcttgaggacatccaggataaagntntcttctatcctnancggggccaanaagcctatga

SEQ ID NO: 691 - DNA, 693 bp, Homo sapiens
  misc feature (27): n equals a,t,g, or c
cgtggggcccccggttgccgccccctnggaaaaaggcattgctggctctgaagaagcaaagtagcagcagcacaaccagccaaggtggtgtcaaacgctcactatcagagcagcctgtcatggacacagccacagcaacagagcaggcaaagcagctggtgaagtcaggagccatcagtgccatcaaggctgagaccaagaactcaggcttcaagcgttctcgaacccttgaggggaagttaaaggaccccgagaagggaccagtccccactttccagccgttccagaggagcatatctgctgatgatgacctgcaagagtcatccagacgtccccagaggaaatctctgtatgrgagctccctcgctgtccagaacagccctaagggttgccaccgggacaagaggacccagattgtctacagtgatgacgtctacaaggaaaaccttgtggatggcttctagggaacagagctggattccttgtgcctcatatgccccaatgctggtctcagtaaaacactgaggtggaagcttacacatctccctcagcctctggtttttcagcacttgggattggggttaaacctttaaaaacggctgtcaggtttgatctcagtgtaacaacatggccagtgcctgttccccactcccttgccccaaaaggatttggaacccaaaaaaaaaaaaaaaa

SEQ ID NO: 692 - DNA, 1382 bp, Homo sapiens
gcccactcgctgcggcgcttctggctccagaccgccctccggatcggaccctgcgaatggttttggctatatcttcatgctgggcttcatcaccaggcctcctcacagattcctgtcccttctgtgtcctggactccggatacctcaactctcagtactttgtgctcagcccaggcccagagccatggctatctcctcttcctcctgcgaactgcccctggtggctgtgtgccaggtaacatcgacgccagacaagcaacagaactttaaaacatgtgctgagctggttcgagaggctgccagactgggtgcctgcctggctttcctgcctgaggcatttgacttcattgcacgggaccctgcagagacgctacacctgtctgaaccactgggtgggaaacttttggaagaatacacccagcttgccagggaatgtggactctggctgtccttgggtggtttccatgagcgtggccaagactgggagcagactcagaaaatctacaattgtcacgtgctgctgaacagcaaaggggcagtagtggccacttacaggaagacacatctgtgtgacgtagagattccagggcaggggctatgtgtgaaagcaactctaccatgcctgggcccagtcttgagtcacctgtcagcacaccagcaggcaagattggtctagctgtctgctatgacatgcggttccctgaactctctctggcattggctcaagctggagcagagatacttacctatccttcagcttttggatccattacaggcccagcccactgggaggtgttgctgcgggcccgtgctatcgaaacccagtgctatgtagtggcagcagcacagtgtggacgccaccatgagaagagagcaagttatggccacagcatggtggtagacccctggggaacagtggtggcccgctgctctgaggggccaggcctctgccttgcccgaatagacctcaactatctgcgacagttgcgccgacacctgcctgtgttccagcaccgcaggcctgacctctatggcaatctgggtcacccactgtcttaagacttgacttctgtgagtttagacctgcccctcccacccccaccctgccactatgagctagtgctcatgtgacttggaggcaggatccaggcacagctcccctcacttggagaaccttgactctcttgatggaacacagatgggctgcttgggaaagaaactttcacctgagcttcacctgaggtcagactgcagtttcagaaaggtggaattttatatagtcattgtttatttcatggaaactgaagttctgctgagggctgagcagcactggcattgaaaaatataataatcataaaaaaaaaaaaaaaaaaaaaaaaaaa

SEQ ID NO: 693 - DNA, 3098 bp, Homo sapiens
caaataggcaaaataacactttatcattatcattggtcatatacctagtgcatttgtctatgatatgtttttgagtatatgacactgaaatattagtgtatctatgatactaaatcatttttatatggctaaaatcatcttcagtaagaactctcttaggatatgaatttaagtgaaaatttactgtcttttttttaaaacatgatgaaacagtaatctatagagcaatttcattagtatatgtgagtaatgatggtttagttaactctacaggctgggtaagggctcataagaaagcttctaaagctctgtgctttgtgttcctctgtgaatgtccattctacttctctttctaataatgcatgcttttctttttgtaaacaaaatgttgacttcatggatcaattaaagagaattgtaaaaacctaaattggcttcagttaacagttaaaaaaaaccccttcaattggaagaaaaaaaaatttaattcatagatttcaatccacacaaaatcatgtcgtcttctctgtttacacctaatgrctaaccttaatctctaaaccattaatggggtgattctaatttctgtcttcttttcctttttcttcctgcatcccatgttgtctgtggtggtttgtgtggttggactctcccctggtcagtatttttatttccaggaggtgttccctgtcttggctgcaaagcactgtatcatgcaggccaatgctgagtaccatcagtctatcctggcaaaacagcagaagaaatttggagaagaaattgcaaggttacagcatgcagcagaactgattaaaacagtggcatctcgctatgatgaatatgttaatgtgaaggatttttctgacaaaatcaatcgtgcccttgctgcagcaaagaaggataatgacttcatttatcatgatcgagttccagaccttaaagatctagatcctattggcaaagccacacttgtgaaatctaccccggtcaatgtacccatcagtcagaaatttactgatctgtttgagaagatggttcccgtgtcagtacagcagtctttggctgcctataatcagaggaaagccgatttggttaacagatcaattgctcagatgagagaagccaccactttggcaaatggggtgctagcttcccttaatcttccagcagcaattgaagatgtgtctggagacactgtacctcagtctatattgactaaatccagatctgtgattgaacagggaggcatccagactgttgatcagttgattaaagaactgcctgaattactgcaacgaaatagagaaatcctagatgagtcattaaggttgttggatgaagaagaagcaaccgataatgatttaagagcaaaatttaaggaacgttggcaaaggacaccatccaatgaactgtataagcctttaagagcagagggaaccaacttcagaacagttttagataaagctgtgcaggcagatggacaagtgaaagaatgttaccagtctcatcgtgacaccatcgtgcttttgtgtaagccagagcctgagctgaatgctgccatcccttctgctaatccagcaaagaccatgcagggcagtgaggttgtaaatgtcttaaaatccttattgtcaaatcttgatgaagtaaagaaggaaagagagggtctggagaatgacttgaaatctgtgaattttgacatgacaagcaagtttttgacagccctggctcaagatggtgtgataaatgaagaagctctttctgttactgaactagatcgagtctatggaggtcttacaactaaagtccaagaatctctaaagaaacaggagggacttcttaaaaatattcaggtctcacatcaggaattttcaaaaatgaaacaatctaataatgaagctaacttaagagaagaagttttgaagaatttagctactgcatatgacaactttgttgaacttgtagctaatttgaaggaaggcacaaagttttacaatgagttgactgaaatcctggtcaggttccagaacaaatgcagtgatatagtttttgcacggaagacagaaagagatgaactcttaaaggacttgcaacaaagcattgccagagaacctagtgctccttcaattcctacacctgcgtatcagtcctcaccagcaggaggacatgcaccaactcctccaactccagcgccaagaaccatgccgcctactaagccccagcccccagccaggcctccaccacctgtgcttccagcaaatcgagctccttctgctactgctccatctccagtgggggctgggactgctgcgccagctccatcacaaacgcctggctcagctcctcctccacaggcgcagggaccaccctatcccacctatccaggatatcctgggtattgccaaatgcccatgcccatgggctataatccttatgcgtatggccagtataatatgccatatccaccagtgtatcaccagagtcctggacaggctccatacccgggaccccagcagccttcataccccttccctcagcccccacagcagtcttactatccacagcagtaatatgtctgctcagcagctcagctgattcagatcagagggaaagaaataccaaccctgcaataagtgtactaaactctacgctctggttaatgtaatgtactctcctggactgaatgcagtgtataatttctgtctacagctagaagctgtgccccagttccacatttgattacacatgtgagatttgctgctgttgcagtataaacactaggtataataggatttgaaattgcattacagttcataaaaattgaaaatgagaaattaaacctgcaagtgaaacatttgaaacgattatactttctacataagacatggttgggacatcagatacttacaaagatggtttaagtatggatactagagaaaattaagttttctttctctttggtttattgatttggtttaatttccattatgctattttgcataatcaaggcactgtaaatcttataattttaaaataaattacttaagaacaaaaaaaaaaaaaaaaaaaaaaaaaaaaaaaaaaaaaaaaaaaaaaaaagg

SEQ ID NO: 694 - DNA, 489 bp, Homo sapiens
  misc feature (418): n equals a,t,g, or c
gaaagtctacccgcctccttgtgacagaagtgcgactgccagctgccgaggcgttcggtcctgctgttgcggccgctgccccagggctgcggggacgctcccggagccctgcctgttccctgtccatccaggccagcagctgaaggagcctcacctgcctcccttctctgagtagcacggatttraggagaagcagcgaagatgtccagcgagcctccccctccttatcctgggggccccacagccccacttctggaagagaaaagtggagccccgcccaccccaggccgttcctccccagctgtgatgcagccccctccaggcatgccactgccccctgcggacattggccccccaccctatgagccgccgggtcamccaatgccccagcctgggttyatcccaccamacatgagtncagatgggmactacatgcctccgggttttttacccttcttcaggggcccccacccacccttggggtaatta

SEQ ID NO: 695 - DNA, 1844 bp, Homo sapiens
  misc feature (13): n equals a,t,g, or c
  misc feature (15): n equals a,t,g, or c
gccactaagctgncntgcgcgcgcctgcaggtcgacactagtggatccaragacaaaatggaaatttaaatgacatcctagaggtagagaaaccgtggagatcgcttttctcagactcaccaacttttaatgggatttcatggggtttggttgtgctgatagggtaaggggaggctgctttctgcccttctccccactcccatctgatttacttaattcagtctcagctgctgaaatttggaaaggaccaaattgctttacagtttttttctttgtgtagtatcttgaaatcctggaaaattctatggaatagttctgtatatagggcacaagtaaaggcattgtccaaagtttatttatttatttattaccctaagaatgctttgccataaccacatttaatgggaaaaacggcagtatcacagatgtaaattaactcaccagatttactgggcctgaactcattctcttcttgctatatgatttagcaagttctagaaggtctccaagacaataattacattggcacaatgtatacttcagtgctcacccgtaggcaaatctctttttaaaaaactctttggtgcacaagtaacacatttggccacaaaacaccaaagaattgtaggcagtggcccctattgagaagttttccggtagagttggaaatcagttgtgaatacattctttgctagttggagtgcttgtttactaagcatgtgccgtcgtaggtattagtgctagtctcaaataggtgcttcccctgaggtgcaggggaagaccaaagtttgcaactcgaactgctttcgtccatgtttctcacattgctgtattttagaaaataggggttaagactgataacaaccttttacattgtgactgtgtttgcattgtctaatgacagataaatccttaacatttctctccaccttagtactttagactaattgtgtttgtccgtccatgccatgaatgagtgggctgtagttgggcctaaataaatgagctgttggaagaaaagaatcacagtactttccagcagtcagtccctggttcctagatgtgttctaagcaatgcaaatgtctaattgtcccccagtgggcatagtcagtgtcgtttatattgtagcagttacagctctgtagtttatgatgcaaatctgccaagagagatgtatgtgtcactgcatggcttctgaaagcaggatgaattttctgcagctgtttcaaagttggggtctgttcttgaatcctctattaattactgtgtgtgagccagagggagctgtggtaagggttgggcccccagcctgtagggaactttctggactcccactctttgaatcgatataggcatttggtctcactacttgaccattctcaccctgtgaaacgtcccacactttgaagcaaatacaattcacagcacagtacacacaaaaaccttggcataagacagagaaggttcttcttattttgtgggctggttgctgtagaaacacataacaaagggcagccctccacttctggtataattgtgtagccccttttctttgggcttgacacctgtcttgaataagagtgattagagctgcataatgtccctctcttggctattgaccatgtggttcacgtacaaaactctgtataagttgaaggaaaatgttcatgttcatatgtacttgtttgctatgactacattttgaggttttgtaaaactgttatttttttttttttcacaatgtgaaactgaaggtcaataaattattagagattttctcttcaaaaaaaaaaaaaaaaaaaaaaaaaaaaaaaaaaaaaaaaaaaaaaaaaaaggggggggg

SEQ ID NO: 696 - DNA, 605 bp, Homo sapiens
cctgcactactctgtcaaattaaaaaatataatagctatctttattctcattttaaagcatgataatcatcaaaatgttgaagtttatcacagttctacattaaaaataagtcatttttgtaggtgagttatccaatacagcaaaggccatcaaagagaaagccaatactttcatggagagctcagagccttaatagatcccagcagcaatgcttcaaccattcccaactccatgttccttgctagatgctcctcaccccaaactcctgcaaatttcaagaatttctgtgtatgwgtgtgttaagggaggagttttaaagtatctctgtattcaacaagatacgtcagcttgtaagcagcagaaacctacttaaactakcttacatgagaaaataacattataaagacataggagtgtttctacaccaagagctggaggtattgtttggtttcatgaagggttaaaatctgtaattccaaaagtaggacttcaggcagctgcaccatcaatctgtgtctttctctcwggtactgtgggactctatwcccgtctgacttgctttggttcccggggcatcattcttggctttgggaaaacacacttt

SEQ ID NO: 697 - DNA, 540 bp, Homo sapiens
  misc feature (113): n equals a,t,g, or c
  misc feature (114): n equals a,t,g, or c
  misc feature (488): n equals a,t,g, or c
  misc feature (489): n equals a,t,g, or c
  misc feature (534): n equals a,t,g, or c
agggcacactagggacctaccgtacaacacttcagcattgttaagcacttaaccatttgaaaaaacttaatgaaatgattaattttttttttaattttactgaaggatgtatnnatagatttaggagggatatgagggtgactaaaaagttaaatttttctaatgtgaacttttatttatgttggcttgtatcttacaatttgtaattttaaagtcatgttaggccaatgraatgtgagcgcctcaagaatagctattaagtatcatactaaatttggcggacgtacagatctgtgttacaaagaaatggaaaagtcatccctgtgtcacggggatgaaaagcctgctagccattccaattgactgagracatcttgcaaagaacccaccttacttctgccggtacagccttgggcaaattaaagtcatgtcaaatcaatttagtagtaagttcccttwtacmaatagttatgtgtccacacacgtgnngaatgttttatgggaactaatggaagcgagcaaatcccagaaggntctctg

SEQ ID NO: 698 - DNA, 496 bp, Homo sapiens
  misc feature (271): n equals a,t,g, or c
  misc feature (477): n equals a,t,g, or c
ggcagaggggagactcagctgatactgcttccttgagatttaatacaccttcctttgatctctcctgtccccattatcccaggaaaatccagagtagcttccagtccattctcattaatccactggatccaaagtttagagaggttccccttccctccagcctccttcctggcccaacagaggagcaccccaccaccctccatcagctgctcaaaacccacaagggaaaaatccctacaggtccatgccaggaggtagtggagctaccctncaggttccattaagtcataccagaaggctgagtgtagaaatgaacattaagaggggttccatctgtagggaaagggttcaagatgcaaagctttacagaaggttctccgtctaattgtgaagattaagagcactggtggacctaggaagatgaagaatggagagtggggaaaccagcagagattttcaggaatgttttagggggcnttttcatcgtttcaaagca

SEQ ID NO: 699 - DNA, 987 bp, Homo sapiens
ggcacgagctcaactgcaaggacgctgtaagcaggaagagaagccacagcgcttcagaaaagagtgggacagggacaagcatatctaagaggctgaacatgaatccacagatcagaaacccgatgaaggcaatgtatccaggcacattctacttccaatttaaaaacctatgggaagccaacgatcggaacgaaacttggctgtgcttcaccgtggaaggtataaagcgccgctcagttgtctcctggaagacgggcgtcttccgaaaccaggtggattctgagacccattgtcatgcagaaaggtgcttcctctcttggttctgcgacgacatactgtctcctaacacaaagtaccaggtcacctggtacacatcttggagcccttgcccagactgtgcaggggaggtggccgagttcctggccaggcacagcaacgtgaatctcaccatcttcaccgcccgcctctactacttccagtatccatgttaccaggaggggctccgcagcctgagtcaggaaggggtcgctgtggagatcatggactatgaagattttaaatattgttgggaaaactttgtgtacaatgataatgagccattcaagccttggaagggattaaaaaccaactttcgacttctgaaaagaaggctacgggagagtctccagtgaggggtctccctgggcctcatggtctgtctcctctagcctcctgctcatgctgcacgggcctcccctccaccctggacccgctctgtttctgcctggtcatcctgagcccctcctggcctcagggccattccacagtgctcccctgcctcaccgcttcctcctcgctcttccagactcttcctgcagaggctcctttctgcctccatggctatccatccacccccacagaccccgttcctccagcctgcgtgcccctaacctggcttttcccatctccccagcataaccaaatcttactaaactcawsctaggtggg

SEQ ID NO: 700 - DNA, 1675 bp, Homo sapiens
  misc feature (1616): n equals a,t,g, or c
  misc feature (1635): n equals a,t,g, or c
  misc feature (1659): n equals a,t,g, or c
tggattaaagcgggtaagtgctacagctgcccacagaaatgctttacagaatcctaaacagggaggcacccagttgaaaacagaaaaaatacatatgtttttgttagctccmgtggcaacagggatcaacagtcacaatgatagaggaaggggcattcaaggaaccattaatgagcaatgtgcctcctctctcaaaatcagggcaagccatggcaccaagatgatgactccagaggtgctggcagaggcatatggcaagaaagagtggaagcacttcttgtcggacactggaatggcttgccgctcaggaaagtattacttttacgacaactactttgacctgccaggagctcttctgtgtgccagggtggtggactatttaacaaaactgaacaatggtcaaaaaacatttgatttttggaaggatatagttgctgctatacaacacaattataaaatgtcagcttttaaggaaaactgtggaatatattttccagaaataaaaagagatccaggcagatatttacatagttgtcctgaatctgtgaaaaaatggcttcgacagctaaagaatgctgggaaaattcttctgttaattaccagttctcacagtgattactgtagacttctctgcgaatatattcttgggaatgattttacagacctttttgacattgtgattacaaatgcattgaagcctggtttcttctcccacttaccaagtcagagacctttccggacactcgagaatgatgaggagcaggaggcactgccatctctggataaacctggctggtactcccaagggaacgctgtccacctctatgaacttctgaagaaaatgactggcaaacctgaacccaaggttgtttattttggtgacagcatgcattcagatattttcccagctcgtcactatagtaattgggagacagtcctcatcctggaagaactcagaggggatgaaggcacgaggagtcagaggcctgaggagtcagagcctctagagaagaaaggaaaatatgagggaccaaaagcaaaacctttaaatacttcatctaaaaaatggggctctttttttattgattcagttttgggactggaaaatacagaagactccttggtttatacatggtcttgtaagagaatcagtacttacagcactattgcaattccaagtattgaagcaatcgcagaattacctctggactacaaatttacaagattctcttcaagcaattcaaaaacagctggctactatccaaatcctccactggtcttatcaagtgatgagacactgatatccaaataagttgtctttactgaaaaatgaagtgaagacccatatatgcagttaaaaaaaagttaattttcaaaaaatactgtaaaagactttaaggaacaagttttattgaccaataagttgatatttgtccataggtctcctttctataaatcatcttgatgtttaacaactcttattatattaaaatctcagtatcctaaaacttaggaaccttattggatattttctattacagtagttttgtggttgggattcacccgggggggccacacactcacacggcacagttcactctttacacatatggccncggtcccgtggggttctcnaaggtgtggttcccttggggcctnttgggcttgggccttt

SEQ ID NO: 701 - DNA, 556 bp, Homo sapiens
  misc feature (454): n equals a,t,g, or c
  misc feature (502): n equals a,t,g, or c
  misc feature (505): n equals a,t,g, or c
ttaaccccacagtctacttttttttctgttgcagaccttaagacaatgtagtaatacgtcttttacccatcccccaaataacagtgtacacagtgtgttttttccccttagtggagtgagcagtatgttagtgaggttaggtgagcatctagatttgttccacagaaaagggtgtttccagccagtatcagtgatgttggtacttctccaacagtctaaatctaagggttttaggagcctgttygattaagtgataagaagataccctcgtctggtgtttctttcagtgctgcctcttcatcttttagcagaaggcacaaatgccttttatttgctccgtggtgaaaagcttccagttctcaataggcacaggatgtcagtggccacagttggtgtaagcctgttcagagtcttctaatttgaaactgtagtggtgtttagtttataaagctanaagaagaatctgtggagggtctggaattgtatttgtgtggtgaaattngtnacttttagatgaggaaagaaaacctttgcttttgcccaaaacctgtgccag

SEQ ID NO: 702 - DNA, 1138 bp, Homo sapiens
  misc feature (1074): n equals a,t,g, or c
  misc feature (1096): n equals a,t,g, or c
  misc feature (1138): n equals a,t,g, or c
gccaaagcgagaatggggacttagttcctgtcccctgagcttcagagaacacaaaaacctgaggcctccagtggctttctgtggctccccagtgaggctgtcagcccctcagtcctcagccacttcctgggctggggacctcacagtttcctgttcctgccttgaggccgggcaaacgcagcaccaactgctccccacaggtgcacagcgtggtgctgtcagagcgggacctgcagcgggagatcaaggcccagctggcccagctgcccgattccgcgccgggacccccgccccggccacaggtccgcctcgccggggcccaagccatctttgaggcccagcagctggcaggagtgcgacgaggcgccaagcctgaggtgcctcggattgtggtgcagcccccggaggagcccagaccaccgcggcggaaaccccagacccgcggcaagactttccatgggctcctgactcgggcccggggcccccccatcgaggggccccccaggccccaacgaggctccacctccttcctggacacccgcttctgagaggaccatggacttagtgtcccccagtctcaattgcctgatggctgatgccagcccggcaaataggcaccgcactttactcttgggactcggggacttggcttccttcctggcaaggaccaggcagtggggaaggaggaggtcctccgtggtacatactgggtcaggcactagcatggaggagggtcacagagtggggcacgtgaggacccatggaaccgtcctggtgcccaggccctcacaagtaccaaagccagcaccaaaggagtcagggaaggggttggctgagtcaagggaccccagagggcaccaggaataaaatcttcttgaacagaaaaaaaaaaaaaaaagggcggccgctctagaggatccaagcttacgtacgcgtgcatgcgacgtcatagctcttctatagtgtcacctaaattcaattcactggccgtcgttttacaacgtcgtgactgggaaaaccctggcgttacccaacttaatcgccttgcagcacatccccctttcgccagctggnttaatagcgaagaggcccgcancggttcgccctttccccacaattgcgccctggaatgggcgan

SEQ ID NO: 703 - DNA, 1062 bp, Homo sapiens
  misc feature (1044): n equals a,t,g, or c
  misc feature (1061): n equals a,t,g, or c
cactgtgtggagggcacctctctgtcccttccgtgtctcactgtctctggaagcttcagcccatgtgtgtcctggtgttcccagccccaccagagcccgtgccgggagctgacagctttcacgcttaaggcacgtgtgacctgggtagtcagacaccacttgagcccctgcccacatctgctggtttggggcttcagtggggagctgacagctgtgagcacaccactgtcccctcatccacctcggcctgcatggggcacccacttccttctgggtggggcttccatggtaagggggcctgcgtccctgcacactgcgaggactgccttgcacaggcccactccctacgacacgtgactcgttttagagctctgtcccagaggcgttcgtatgtgacccacagatggcgtcaatgtgaacacctctctttgtgctgaatttctgggccattcttttcctgtcttatttctaaatttccttcttccaagatgaaaacaaaagaaaaacttaaaacagaaggtattaaaaaaacaagagattcccaccattatttaggttcacctgcaraacaaaaatcttactccarcccctcaatgccatcctgacacactttatgcaaaaagaattttcccagataggctagccagaaaaaacttcaagtcctctgtaacatctgaggtgaccaagaggcagaagagcagagcagtcgggggccgtgtcctggctgatcccaactgcagctctgctgtgggggcccgtgggagggaggcagacccctgggctttcctgctggccacggagactctgctcctgcatggaaagggagcctgggagccagcagcccacgcctggggagcctgcctggggccatgtgaccatggcctctccctgggaacgggctgaccacaacacaccctgctgccatccacttctgtttactctgcaaatgtaagaaagaaccacttggccagaagtgtcccccagatgstttttttttttttttttgggagacagttttgcyyttgyttcccggytggagtgcantggcatggatctaactnt

SEQ ID NO: 704 - DNA, 865 bp, Homo sapiens
  misc feature (685): n equals a,t,g, or c
  misc feature (831): n equals a,t,g, or c
  misc feature (847): n equals a,t,g, or c
gagagaactagtctcgagtttgtttctcttatatgcccaccattttttcatatatatatgatttgattttatatacacatatgtatacatattatatataaatatatatgtgtatacatatatgtgtgtatatctatgaatcaaacatactgtttctgttggagatggttcagaattataaagattatctgaatctttatctgtgagcagtctccaagkaagaagttgmraggtgaagcctttgactgctgtcatgtctgaggtcattccaaggacatgggagactgctgtccatggttggatcctcttaacatcagcagagttctgtcaagttacttagctttcactggggcagctctagcattccattaattcaaaatgktgtccttaatataagcctctamcatttaaaataaaaattttaaatgtatccattaagggaataattacatattgaattcctaagaaataagaattatttgggtggttttttctagatagaataaacacaagagctggactatattaactgttgtatacacttttttaactggcattttyagttacttgtgatttttccaggaaaaataaaaatgaattaaagtggaacagtggacttctaattggttttgtcttttgattacatttgaccatcaacaatgatgtaagccttggatagaatgtngcccctcagtgccccacttaaatttcttggtaaacctttggtgtatacacttcattgtgctttttggaatgactctaaaagcccataaactaatgctttgcaaagcctaaataaaaatggttgcagcctgtattaggaaccacttnccttttatggtcctgnatgtaaatagggggtttt

SEQ ID NO: 705 - DNA, 1383 bp, Homo sapiens
gctgtggagcggctgccggcgtttcggggcgcgcctcggctgcctgcccggcggtctccgggtcctcgtccagaccggccaccggagcttgacctcctgcatcgacccttccatgggacttaatgaagagcagaaagaatttcaaaaagtggcctttgactttgctgcccgagagatggctccaaatatggcagagwgggaccagaagcatgtgtgcctggatgattgatagcttcggaaatgaggaacagaggcacaaattttgcccaccgctctgtaccatggagaagtttgcttcctactgcctcactgaaccaggaagtgggagtgatgctgcctstcttctgacctccgctaagaaacagggagatcattacatcctcaatggctccaaggccttcatcagtggtgctggtgagtcagacatctatgtggtcatgtgccgaacaggaggaccaggccccaagggcatctcatgcatagttgttgagaaggggacccctggcctcagctttggcaagaaggagaaaaaggtggggtggaactcccagccaacacgagctgtgatcttcgaagactgtgctgtccctgtggccaacagaattgggagcgaggggcagggcttcctcattgccgtgagaggactgaacggagggaggatcaatattgcttcctgctccctgggggctgcccacgcctctgtcatcctcacccgagaccacctcaatgtccggaagcagtttggagagcctctggccagtaaccagtacttgcaattcacactggctgatatggcaacaaggctggtggccgcgcggctgatggtccgcaatgcagcagtggctctgcaggaggagaggaaggatgcagtggccttgtgctccatggccaagctctttgctacagatgaatgctttgccatctgcaaccaggccttgcagatgcacgggggctacggctacctgaaggattacgctgttcagcagtacgtgcgggactccagggtccaccagattctagaagagctgttctggcaggggcctggagtccagagccgcagcttcgctcttttcggggggcctcagattcctctgctgctgcccttttcctctggagatctgcgagaagggtgaactgagataatggatgagaaagcatgttgaaaaccacagccggggcttttctctaaggttatcgagtacgtggttctcagggatccaagaacagtgatggacaaggcaaatgtgagccagtatggtcatcagtagctctatattgattatcagccagatggcctaaaagatacctgtctcaatattactagtgtatttttcaataaaataaaccatcactaaaaaaaaaaaaaaaaaaaaaaaaaaaaaa

SEQ ID NO: 706 - DNA, 1155 bp, Homo sapiens
  misc feature (36): n equals a,t,g, or c
ggcagagtgattattttaatgtaaccttgctaaagnagtgatttctatttcctttcttaaagaggaggaacaagaagatgaggaagaaatcgatgttgtttctgtggaaaagaggcaggctcctggcaaaaggtcagagtctggatcaccttctgctggaggccacagcaaacctcctcacagcccactggtcctcaagaggtgccacgtctccacacatcagcacaactacgcagcgcctccctccactcggaaggactatcctgctgccaagagggtcaagttggacagtgtcagagtcctgagacagatcagcaacaaccgaaaatgcaccagccccaggtcctcggacaccgaggagaatgtcaagaggcgaacacacaacgtcttggagcgccagaggaggaacgagctaaaacggagcttttttgccctgcgtgaccagatcccggagttggaaaacaatgaaaaggcccccaaggtagttatccttaaaaaagccacagcatacatcctgtccgtccaagcagaggagcaaaagctcatttctgaagaggacttgttgcggaaacgacgagaacagttgaaacacaaacttgaacagctacggaactcttgtgcgtaaggaaaagtaaggaaaacgattccttctaacagaaatgtcctgagcaatcacctatgaacttgtttcaaatgcatgatcaaatgcaacctcacaaccttggctgagtcttgagactgaaagatttagccataatgtaaactgcctcaaattggactttgggcataaaagaacttttttatgcttaccatcttttttttttctttaacagatttgtatttaagaattgtttttaaaaaattttaagatttacacaatgtttctctgtaaatattgccattaaatgtaaataactttaataaaacgtttatagcagttacacagaatttcaatcctagtatatagtacctagtattataggtactataaaccctaattttttttatttaagtacattttgctttttaaagttgatttttttctattgtttttagaaaaaataaaataactggcaaatatatcattgagccmaatcttaaaaaaaaaaaaaaaaaggtcgagccggccggctaattagtagtagtaggcgccgc

SEQ ID NO: 707 - DNA, 1417 bp, Homo sapiens
  misc feature (1378): n equals a,t,g, or c
  misc feature (1392): n equals a,t,g, or c
  misc feature (1399): n equals a,t,g, or c
  misc feature (1404): n equals a,t,g, or c
tgagaccctgtctcaataataataataataataataatagtaataatgaagtaaatgggataaggaaagaargataattatctttaaaggttgattcccaccctccctccccagttacttaaggaactaagtgagtacatctccagttgcccatgaaagcataagtttgttttcctcagctgaggcaagtggtagagtatacaggataacgaagtaacatgtaaaaggcaggacgcacataaaggtgtacatggctattgtttcacctggagaaaccacatgattgggacctgaaggtttactgactgactacaggggctgattgtgaagcacgaggaaccccatgtgtgtggagactgtagggtgagagcacacaattattagcatcatttctgagtgatctcacagattttttttcttgtgtttgttttgctttttgacaactgcttctcccacgttccttgcaattctattctctcaccttcactttactatttgtattcgatggaccaggataattcaggcaaggttaccttgtaaacttgaattggccacacaccatgttgtcacccagctggctatgaagtgaataatggtactgaaagtaaacctgaagacctttctcagatctattttaagtctgagtctgaccaaccatggaaaatattcgacatgaattaatgtagagaactataaagcatttatgacagctccaagaaaaatcatctactctatgcaggagatatgtttagagacctctcagaaaaacttgcctggtttgagggtacacagtaccattttaatcttctgaaaatatctgtattcctgctctttttctgctgtcactgtcaatctgctatatttttcactatcctattaaaatattactgtctcctttatctgttcaatgtccatattttaaaaaaatcttccttgtatgagctattctgatccaaataatttctctgatatttctctatatggctcccacaacaatttcattgttgttagcatatctatttctccatacattgtaaaactgtaatccttaggtatttctaaaacataaagaggagaattaagtcagctgcagaacaatggggctgawtcytctgctttttctctggaaaatctttcattgcttttggtggaaatttacctagaggttacaaccacaggatgtagcttggtctcttatttgcctttttgggaaaccaattaagattaatacaggataaaggaaaaaagcaatctattcattatataacacagttgtttgtattacttgttccctgcaaaggcaaatctgttgaatgcttgcattttggaattcttttctaataggaacaaccaaaaaagggcttcttatgggtgcagncgggaaaaaaggtncattttnttggnttgcattcttaac

SEQ ID NO: 708 - DNA, 948 bp, Homo sapiens
ggtagacagtgtgtctcactagggtgggttatcagaaaaaggctctacaaagtgacatttaaagactgagaggaaaggagagagttgtatcctaccaatgattgcctcccctctcccacatattaatgtattacttaaaggaactgattttttaaaattggattgaatcatggaaacattctttgagaatatggaaataatttaatatttttcccgtttccagctcttcagctgtaacagtgactcaaaatcaattacattaagattagtttttttgttytggttttttttttaagwactttgtgctttaaatataagkgaaaatactgkatttacttttgtgtgcttccatctgaactaaagtttcccatggygcttaccgagttaggtctggctctgggagaggagtggacagcagctggttgagatacatccccatctggagacaggactgccactgacagaagatgtgagctgtgtctaagtccagtcttgtgcccagccgtgtctgcgccttcactctttggaactctgcatacaacatcttagcaccatcttcctgcagctcttccttacctaaataaagaaacagcccaagggcagtatttctaaaagcactgtaacagcttttcattttctccacatatactacaaattctataaagaaagaaattaatttaaaaaaactaagatgtttttctcttctggcttcataaatgccttgctgtataaattgaaatattgatactgaactgtctttttaatgatgacctaactttattcaacccatcggaatttactttttccctgaaataagatcttttccactggtctactacctgaccataaacatgtctgcatttgaattctctaaaccctaaatctgtgtctatgaaaaatacaaatgactattaaatattattctctttactgttctctttcaccgaa

SEQ ID NO: 709 - DNA, 1329 bp, Homo sapiens
ggcacgaggggagtgctgtcgtgggggattgtgggaaaagatggcggctgccgcacaatcccgggttgtccgggtcctgtcaatgtcacgttctgccattactgcaatagccacatctgtgtgtcacggcccaccctgtcgccagcttcatcatgccctcatgcctcatgggaaaggtggacgttcctcagtcagtgggattgtggccactgtgtttggagcaacaggattcctggggcgatatgttgtcaaccaccttggacgcatggggtcacaggtaatcataccctatcggtgtgataaatatgacatcatgcaccttcgtcccatgggtgacctgggccagcttctgtttctggaatgggacgcgagagataaagattctatccgacgagtagtacaacacagcaatgtggtcatcaatcttattggacgagactgggaaaccaaaaactttgattttgaggatgtttttgtgaagattccccaagcaattgctcaactgtccaaggaagctggagttgaaaaattcattcatgtttcacatctgaatgcgaatattaaaagctcttctagatatttgagaaataaggctgttggagagaaagtagtgagagatgcatttccggaagccattatcgtaaagccgtcggacatctttggaagagaggatagattccttaattcttttgcaagtatgcatcggtttggtcctataccccttggttccttgggctggaagacagttaaacaaccagtatatgtcgtagatgtatccaaaggaattgttaatgcagttaaggatcctgatgccaatgggaaatcctttgctttcgttggtcccagtcggtacctccttttccacctggtgaagtacatctttgctgtggctcacagattgttcctcccattccccttgccgctttttgcctatcgatgggtagcaagagtctttgaaataagcccatttgagccctggataacaagggataaagtggagcggatgcacatcacagacatgaaattgcctcacctgcctggcttagaagaccttggtattcaggcaacaccactggaactcaaggccattgaggtgctgcggcgtcatcgcacttaccgctggctgtctgctgaaattgaggatgtgaagccggccaagaccgtcaacatttagtgcctcctgagcagctcttggttttggcgtcttttgggtcggcccatgtggtttgagcacccagccaggcggtctctttagaggatcctgtacacagttccactattaaaacatttcaggttgaaaaaaaaaaaaaaaaraaaaaaraaaaaaaa

SEQ ID NO: 710 - DNA, 534 bp, Homo sapiens
  misc feature (529): n equals a,t,g, or c
attctgactttggttttgattctggtttggtataaactgtaaaagtgtgtgtgtgccctttttacctgttctttgttttgtggtgtgtgtatggtgtgagtgtggtgttttgtcttgaggaagcatgggtcaggcacaaagtaagcccaccccaccaggaactatgttgaaaaatttcaagaaaggatttragggagattacggtgttactatgacaccaggaaaacttaggactttgtgtgaaatagactggccagcattagaggtgggttggccatcagaaggaagcmtrgacaggtcccttgtttcaaaggtatggcacaaggtaacctgtaagccagggtgcccagaccagttccygtacatagacacttggttacagctggttttagrcccttcctacccccacggtggttgagagaacagcagcataagcagctggcagaggcaaggaaagaccagcaaagagacagagaagaaagagacaggaaaagaggcaaagagagagaagaagagagagaggaagagncagag

SEQ ID NO: 711 - DNA, 1143 bp, Homo sapiens
  misc feature (14): n equals a,t,g, or c
  misc feature (41): n equals a,t,g, or c
  misc feature (77): n equals a,t,g, or c
  misc feature (1110): n equals a,t,g, or c
aaatgctccagggnatcgtcccaacaacttaaaggaggctnaacacctgttgcacgcctgctcatggcagcgcttgnagaaatgactgggggagtccagcgaggtcggggacgcagcggtctccaggctccagaaacctccttagccttttgtggtaactttggtccggcggcggggggccggtgagcaggaactggagggaggcggtggggaaaccgtggatccgtccggctgagggtgcgtggatcagactgggctgagcaggcaagtcatcgtcgggtcacagcgaggcgacccaggagcgaacttccagggcagcctcccttttgttggcgctgggagagaatgtgggcatgggggtggggaggcgcgaagctccgaggccgggccgcggatactttaaagctcagagctgggagggcccaaaggaaggggcggcgtscmcatggttacccttctgtgcgcgggtcaagtagcttcttctggagggcgcaaggcgcggcgggggtgatgagcccttgggttctcgctccgactgctaaattcgcttggccgggtccaccttctcgtggcctcactcgccacacggatcagaatccggagcaggcagttctctctattctgaggctcctgcggctgccgcgctgacttccctgtgtgcgggagggaactctgggcaggctggttttcttggaatgtgtttacgatgttgaatgggacttgaacaggaagctggacgctgcagctggaactagcgtgccaagttatttatgattccatctgatatacataggagagaaactgatagaagaattctgatggcaactgtatgatagaagctatataaagtcaagtgtccattttctttcaactatatttgagcatacccaggrtttaagtcgtggaactgaacatttatttggctgatcctcatcatgaaccgtgcttttagcaggaagaaagacaaaacatggrtgcwtacacctgaagctttatcaaaacatttcwttccctataatgcaaagtttcttggcagtacagaagtggaacagccaaaaggaacagaagttgtgagagatgctgtaaggaaactaaagtttgcaagacatntcaagaaatctgaaggccaaaaaaaaaaaaaag

SEQ ID NO: 712 - DNA, 3779 bp, Homo sapiens
  misc feature (3758): n equals a,t,g, or c
tcttattcgtgtatttcttttgacactttacccctctatgaagcctcagaggtgttttaaaattgtgttaggaaacacacagagataagaaaaggcaaatggtcctgatctagtgtctcagggaagagtctggaaaggaaacgcggcgragtgggktgggagagggggcytgtggttttgcttctgtccgggctraagactgagtaaggtagggcccctccttctgcggatgggtttctctctcattccaccctccacccactccggttccgcgtgcacgcgragatagtccartgggcccacagataacgaccatcagagattaaagaaggaaagtcagcgagcttgaacacaggcgtcccgtgtggaaatgtccaaggagaccgccagaagtgcgcaagccggagtcggctagagtttccttctcaccgagagggggagcccggcgttcccggccgggagcgacccggagtccccagccccgcgtcccagctgccgccagcgccagttttggattcggcggattaggaagaggagggaggggggagagagcgcgaagagggaggggaccgaagctggagggtcccgagtccagcgccgtgttggcgtaragaaactttccctctcggcctcggagacggcgccccggmcgtgcyggagtggmratcgccaggctcggaggaaccggcagctctccacgcccctgcccgaagcctgacccgactgcctctctcagtgagttatttatgattccatctgatatacataggagagaaactgatagaagaattctgatggcaactgtatgatagaagctatataaagtcaagtgtccattttctttcaactatatttgagcatacccaggatttaagtcgtggaactgaacatttatttggctgatcctcatcatgaaccgtgcttttagcaggaagaaagacaaaacatggatgcatacacctgaagctttatcaaaacatttcattccctataatgcaaagtttcttggcagtacagaagtggaacagccaaaaggaacagaagttgtgagagatgctgtaaggaaactaaagtttgcaagacatatcaagaaatctgaaggccagaaaattcctaaagtggagttgcaaatatcaatttatggagtaaaaattctagaacccaaaacaaaggaagttcaacacaattgccagcttcatagaatatctttttgtgcagatgataaaactgacaagaggatattcactttcatatgcaaagattctgagtcaaataaacatttgtgctatgtatttgacagcgaaaagtgtgctgaagagatcactttaacaattggccaagcatttgacctggcatacaggaaatttctagaatcaggaggaaaagatgttgaaacaagaaaacagatcgcagggttacaaaaaagaatccaagacttagaaacagaaaatatggaacttaaaaataaagtacaagatttggaaaaccaactgagaataactcaagtatcagcacctccagcaggcagtatgacacctaagtcgccctccactgacatctttgatatgattccattttctccaatatcacaccagtcttcgatgcctactcgcaatggcacacagccacctccagtacctagtagatctactgagattaaacgggacctgtttggagcagaaccttttgacccatttaactgtggagcagcagatttccctccagatattcaatcaaaattagatgagatgsaggaggggttcaaaatgggactaactcttgaaggcacagtattttgtctcgacccgttagacagtaggtgctgacatcaagaacaagaaatcctgattcatgttaaatgtgtttgtatacacatgtcatttattattattactttaagataggtattattcatgtgtcaatgtttttgaatattttaatattttgaaaattttctcagttaaatttcctcaccttcactattgatctgtaatttttattttaaaaacagcttactgtaaagtagatcatacttttatgttcctttctgtttctactgtagatgaatttgtaattgaaagacatattatacaaatacctgccttgtgtctgagttctatttagttagcatcttgaaatttgtattcattttccagatggctagtttattaatgatttcccaaaagccataccttaaagataactttttaaattctgaagagacatgccaatgtcaaactaaacatgttctgtttttaaaccaacaaacatgttactattcattggacagatatcattttatgtataaatactgttcacatcactgggaaaatgtaaactttaaacataatgccacaaggtcactaatttctagcaggtaaaattataaggatataaattccaataataaaccaaatgtatttagagtatttattagtaaatgcaaggtgatgttagttatgatcagttatactctaaatatttaatttgttttataaaggtagtgaaaaaatgaaaatttgctatttattaaaaaacattaaatttcattccaaatgagataagtgatattactataacatctaagcatcatctgatttgatattccctaaaaaacatttggaatatatgctatctatagattcagtatctactacccatatttactttaccaaatatatttctcctcactgcataaggactactcttctcatattttcttctttgatgaagatatttttcaccaaagtttattttgtgatgccctcttggttttgatactttaaaatctgtggcacccgttctacatgaattatcaatatttggtaaattcaatctgtatttgttttgttaaagtcaaaaatctcattttccaaaaaaaaaaaaaaaacccagttactgctcagtttagtcttgaacatgagcaataaaattctcttgcatttcattattgatgtgctgatgaacctggacttttaaaaatatttgtttcctatacctttaccctttacctaacagactaatttgtactcagtaaaacaaaaatttatggtcaaaatttctaacttggttcatcacattataagataaataaattaaattaatgaaaatgtgacttagagtaggggtagccctcaaaaatagatttatcatttactcattggaattttcttcaagtgttaaaggtacattttcactaggaaaagaaatcaaatatgcttatgcaatatatatttgtgtgtttttccttaatgttatatggtatatatgagccttcttgtttagtttcttttatctgctaagttgtaccttaattagagggcaatatatgtttcataaagaagagtctttataattttgtttgtcagatagtattttggaatttgtataataaggatgtttagaagccatataagtggctttttttaacagatagaatttgtatttttattgtactttaaaaagatttatgtaataggtatatatttagtggccatttattatcaatggtaacacaatggagtactaagatggtatttgcacatttaagatatgttactttaccaatttttaatggtaatcaactctgctactggcatgatgaaatagtacataactggtcattaattatgaacatttayttctccagtgcgtttttatgaagatctggttgaaaattgtatttctatgtaaactcaacgatatgtttggttttcctgaaaataaatgattttaaataaaaaaaaaaaaaaaaaaanaaaaaaaaaaaaaaaaaaaaa

SEQ ID NO: 713 - DNA, 1036 bp, Homo sapiens
  misc feature (1): n equals a,t,g, or c
  misc feature (25): n equals a,t,g, or c
  misc feature (54): n equals a,t,g, or c
  misc feature (1017): n equals a,t,g, or c
ncgccctgtgctggaattcggcttngagcggccgcccgggcaggtacctcggtntcaggttcatccatctccagtggaatgttttcaataaaagatgaagaaaatgtgtgtgatctttaataacacatccctatagaaagtggataaaagatataccaaaactgtaatacagatatatacaaatataggtgcctttttgattactcttgtttgtctagtatggtcttggaaagaaaaccaagcaagcaagttgctgcctattctatagtaatattttattacacatgattgatatttttgtggtagggaagtgggatgctcctcagatattaaaggtgttagctgattgtattttatctctaaagatttagaactttagaaaatgccgacttcttccatctatttctgaaaggttctttgtggatttatatagagttgagctatataaacattaactttagatttgggatttaaaatgcctattgtaagatagaataattgtgaggctggattcactacacaagatgaacttcacttcataaattaattataccttagcgatttgcttctgataatctaaaagtggctagattgtggttgttttggttaaggtgatatggaggtgggagagcttttagttaagtaagaagctatgtaaactgacaaggatgctaaaataaaagtctctgaagtattccatgccttttggaccctttcctcgcaactaactgtcaactgttgatcaaaaaagtcaaggcattgtatgttgcttctgtggttattattctgtgatgcttagactacttgaacccataaacttggaagaatctttgagcaaattttctcagttgtctgtatgacttcagtatattcctgggaatgccataggattttttgtgcttgatacatggtatccagtttgcatagtatcacttctttgtaatccagttgctgttaagaatgatgtacctcggccgcgaccacgctaagccgaattccagcacggctggcggccgntaatagggatccagggtcg

SEQ ID NO: 714 - DNA, 4443 bp, Homo sapiens
cccacgcgtccgcccacgcgtccggattacttgttccctgcaaaggaaatctgttgaatgcttgcattttgaattcttttctaatagaacaaccaaaaaaggcttcttatggtgcagcaggaaaaaagatcatttttatagctttgcattcttaacatagcatttaaagagcggcatgaattagaggaaagacatggaacacacaggtagtcggtttgagatcatcggcttaaaagtatcctaggatggtaatgacccagaagtatttccagttgtctagtggtgtggtatgcaggaatgagagtgttttcttccattcctgttggacargtggcaatcttagcagagccactatttggagttgataactaaagatgcaaataacrtgactatgccttctggtcatcctasgactatttggagttctccaaaaccttgtaagaggcatgtcaggcatgcagtaaaagcatctacaacttcagctgggcactggcagcataggtctcatcttggaccatacagtcccactttatagaagagrgtggaagttctccaaaacaatatccacaacaaagtctgacctcactctgagggagatgggaagtgggaggaagaaggactaaccagctccctggagtaagaggaatttgctttccctgtctgcccaccaggggctatatgtgccacctttcaggttggggccaaggaagtgatgtcagtgtgacagaagggagagttagacctccagacgtcagcctccctcccatggggtacattttcaatctgagtgttgttgccttagctgtgttggtattagcttgattggttgstccgctggttatgaggtgtagggaggcagtttttgtttagtttttaggactttgcctcttcctttgtccttagcataatttctaggcagagcatccacgaagtcggttttcattgccagctcaagagcgacaatcatttacgagttcctatgttatgttaggtgccttatgtatattatcccaaatccactgcatggtttaaatacaggcactggaatataaatgaaaaaggtcattacagtcactgactttctgcaggaccttaaacatttctctttccacaagtttccccttaatcatgtgtcaaacctctcttcctgacgggaatgttgtgctataatgaatctgcataacgcttgggattctaggaggaaggaaggttccatggacatgtaagtacagcatattcccctcagtcttctaggagggcagagtgaatcccagaactggtaagattgggaatctgagcattgccactttaatcttagaatatttatcattttgacacatcctgttttttagagaggaaaacaaacacagtttctgcattggtagtgtaaagcataccttgttaggaacgtgttttgtaagacacatttgggttgtcattctagagcatgtcaaactttgtacttcaaaatatatttagtatgattgttagtggtaacatatatcaaggctttgaattaactgttttatttaattttcacaagaagcacttattttagccataggaaaaccaatctgagctacaaatagttctttaaaataagcccaggttatttagctattctagaaagtgccgacttctttcaagaagcaggcattgtaggacagctgagaattatcacatagcctaaattctagcctggcagcaagagtcacatctgagatgtccaaaaaaaaaaaaaaaaacacctgrtctacattgaaagggggtagactaacgtatgtgagaccattttcctatttgcagttacaaggttaaagaacttkgaaggcattcggctgctaagaggcatgtcgaacactctgkgtggctctttcacagtaaaccctyctaagagcagaagacacatggctgttagtgtctgcgtttagatttaatttctcaaataaaggcccttggctgcgtatcatttcatccagttataaactagggctcctgcaagcacccccattctaagggtgaattattgaaatcagttgctatttgatgagtcacaactggcccagcaggcagggcatttgaagtcatggtcatcaaaaagaaatgattgttttttgaaaagctaaatgcttaaaatgcttctagagggaagtcgtggggcgtgtgctcattctctttaaaatcagggttgttgagtttgtttttaaacatttttataagttcatgagaaaaaatatataaattctaagaaccaacactgtattcccagaaacatgaccctcgctggtcttgggtccacatatcattggactctgggggacacaaagatgcctgtgacactttggtgttgccgagttagtcaacaattattctgggaaaaagcagaattgaattcttctctagatgtcctaccagggttggccaagggccacaaagcaggctaataaattcccacaggatccagacaccaggcaaaattgctctaagaagccagttactgtcatccctctatggttctagaaaaaatagtacaaaaatgacaggtcatcctatgagcgtcatgccaatgaaaccccatcttctggagaagcccttgaatcagaattatcttttttcttgatgtcgtcagatgcagccagtttcttaatttttttaaaaactgtatgtttctgtggtatgtatatttgtacacctaactacctggcacttggaaatcacagcactactcagaggcaattgaataaagagaaatttaattttaaatatcaagtcctgtcaaacatttctcaaacttctgattttatcaaaggtttgccagccaataaagtgcatcccaagtatacaggggagaaagctagactcctacagggtcctagagtttaagtaatttttttgttattaatataggtaataatttttctaatttttattttttggttccaaatgtaaagctccttgtgtttacctctgtttatgtcattcttgacatgtttatctaaattatgtgtgctctgtgacaggtgaaatgtaaatctgggatccatagtcaagatatcataaggacctacttcccagcctacctttcttcctctacctgataatgataatactcaaaataacaacattcaaaggaaacacaaagaaatcctgctttcacatctcctatttcttgggctccttaataactactgatggtttgttcatgaaaaaaaatttttaaatcaaaagattgtacttggccctgagttgaaaaaatttcaaaaatcaaaagtttgtacttggccctgagttgaaaaaaaaaattcacattctaagaataaacagaaaaatgttcttcttggaagtaaataacaaaagccatagtgttttcatttgtcttttcttcaggatacacggtagaagtcagagaatctttgatacttttatttggtgcaataatcaaggccatgcaacaacccaaaatcaagcattttggttcaagtcaggatgacatgagtggggacagaagctgtggcagtcattcaaataatctcatgggtcctgaggaaaagacaggagttaaygtattaagtttctactatatgcaggaactgtgttaaatattttacataagttttgataatagctaacattagctgagcacmaaatttgggccctgatttgtgctgrgtatctttcacagattactgcttttaatcagcagtccttgtgagctaggtatgatcattatccccattttatagattacagatgagattctgargcacaaagaggctaagtaacttgccaaagatcatacgatgttaagtwatggcccctggattcagtctgcagcctgaattcttaaccaattatactgtgatttcattattcttcagaattacactaaaaagaaggtattattcccattttacagatgaggtatctaagctcagagaagctaaacaacttgtgcaacaatcactaagcttataagcagtggattagggttagatttagatatttgtctggcatccaaacctgtgctctccctacagtaccacatggtttccacagtctcatcagaccccggaatttcactccctgagactgcttaattgtgaatttcccaaactgattcaccaagagcctactgtctctgctttgtagatagctttgaccacattcaatgacattaggaaagactccatttcccaagatggctcagaaaatcagatgctatgacgcatgttgaaagtgaaaacccatctctgagaaagaagcatctgttttattagtaaaaaaaaaaaaatgaaatttacagcaatgttgtgtgacttctcaaaattctttcattttcttatttcagaatgaatagtgttgttcgttggctgggaatggggaagaatgtgatttttaaaaataaagcataatcaaactctgcayaaaaaaaaaaaaaaaaac

SEQ ID NO: 715 - DNA, 2099 bp, Homo sapiens
  misc feature (2096): n equals a,t,g, or c
caggcaaggcagtggccgctttgactgcttgcttcggagatmcgagacgacggagaaggcactcttatttaccgaccaagaaagctcctcccccgtcctccgttagctaattaaaacatttttcagggacgtagccatccagagacattccattattgttccattgacctttccctcatcactgagtcctttggagctgagttatgtcaacagctgccttaattactttggtcagaagtggtgggaaccaggtgagaaggagagtgctgctaagctcccgcctgctgcaggacgacaggcgggtgacacccacgtgccacagctccacttcagagcctaggtgttctcggtttgacccagatggtagtgggagtccagctacctgggacaattttgggatctgggataaccgcattgatgagccaattctgctgccacccagcattaagtatggcaagccaattcccaaaatcagcttggaaaatgtggggtgcgcctcacagattggcaaacggaaagagaatgaagatcggtttgacttcgctcagctgacagatgaggtcctgtactttgcagtgtatgatggacacggtggacctgcagcagctgatttctgtcatacccacatggrgaaatgtattatggatttgcttcctaaggagaagaacttggaaactctgttgaccttggcttttctagaaatagataaagccttttcgagtcatgcccgcctgtctgctgatgcaactcttctgacctctgggactactgcaacagtagccctattgcgagatggtattgaactggttgtagccagtgttggggacagccgggctattttgtgtagaaaaggaaaacccatgaagctgaccattgaccatactccagaaagaaaagatgaaaaagaaaggatcaagaaatgtggtggttttgtagcttggaatagtttggggcagcctcacgtaaatggcaggcttgcaatgacaagaagtattggagatttggaccttaagaccagtggtgtcatagcagaacctgaaactaagaggattaagttacatcatgctgakgacagcttcctggtcctcaccacagatggaattaacttcatggtgaatagtcaagagatttgtgactttgtcaatcagtgccatgatcccaacgargcagcccmtgcggtgamtgaacaggcaatacagtacggtactgaggataacagtactgcagtagtagtgccttttggtgcctggggaaaatataagaactctgaaatcaacttctcattcagcagaagctttgcctccagtggacgatgggcctgattaccagctgggacttagagtttctgtgcacattttttcactgagcatgtcaagaaactgataagatcaaaaaggtctcctaactcactagatcagcgcacaagtcagtgtaaaccacttagatagtagttttttcataaatgctcatcatatttatgttccgctgtacatgttcagtataaatatatgtgtagtgaagctactgtgagtctttaaatggaaagagcaaatgagaagtggtttggatacacttgatgagagatgagagtgtcacattaataatttttaagactcttaggcagctatgggtttcttttgatcatttttgttctttattcatttgaacacgtttttgaagttcttcaaaactagtcagtttgaattttgacagctattcaatatgtgatctccaagtttaaaaaaatttttttccagacttccctaatcctaaaatgcgagtttttatttttaataactgtaccaaggaataagtatgaaaacagttctctgttaccatattttgtattctggaccacttactggtgaaagcaaccatgcaaaagaaattaatttggscaggcatgagccaccgcacctggccagatctttgtatgtcttaagtgtttcaaagttataagcatttttctggggggatgtccattttggagggatccattttgatcctttgtactctataatgtgaactttcccctgttccaacacttaaaagaaaattattagcacataatctaaaagatggaatttttttttttnctt

SEQ ID NO: 716 - DNA, 574 bp, Homo sapiens
  misc feature (507): n equals a,t,g, or c
  misc feature (537): n equals a,t,g, or c
  misc feature (547): n equals a,t,g, or c
ttcgacccacgcgtccgcccgggcgcacggccagccgtctcgccgagtgcggactggccggatctgctgtcagtcagcgggaacagacttctccctctccatctggtcaactgcgggagaaaaattttcgagaatttccagcaggcaaggcagtggccgctttgactgcttgcttcggagatccgagacgacggagaaggcactcttatttaccgaccaagaaagctcctcccccgtcctccgttagctaattaaaacatttttcagggacgtagccatccagagggatttgcttcctaaggagaagaacttggaaactctgttgaccttggcttttctagaaatagataaagccttttcgagtcatgcccgcctgtctgcttgatgcaactctttctgacctctgggactaytgcaacagtagccctattgcgagatggtattgaactggttgtagccagtgttgggggacagccggggctattttgtgtakaaaaggaaaacccntgaagttgaccattggaccataattccagnaaggaaaagntggaaaaaggaaaggtccaaggaatgt

SEQ ID NO: 717 - DNA, 847 bp, Homo sapiens
gcgtcgcgcgctcttcctcggagctacccaggcggctggtgtgcagcaagctccgcgccgaccccggacgcctgacgcctgacgcctgtmcccggcccggcatgagccgctacctgctgccgctgtcggcgctgggcacggtagcaggcgccgccgtgctgctcaaggactatgtcaccggtggggcttgccccagcaaggccaccatccctgggaagacggtcatcgtgacgggcgccaacacaggcatcgggaagcagaccgccttggaactggccaggagaggaggcaacatcatcctggcctgccgagacatggagaagtgtgaggcggcagcaaaggacatccgcggggagaccctcaatcaccatgtcaacgcccggcacctggacttggcttccctcaagtctatccgagagtttgcagcaaagatcattgaagaggaggagcgagtggacattctaatcaacaacgcgggtgtgatgcggtgcccccactggaccaccgaggacggcttcgagatgcagtttggcgttaaccacctgggtcactttctcttgacaaacttgctgctggacaagctgaaagcctcagccccttcgcggatcatcaacctctcgtccctggcccatgttgctgggcacatagactttgacgacttgaactggcagacgaggaagtataacaccaaagccgcctactgccagagcaagcttgccatcgtcctcttcaccaaggagctgagccggcggctgcaaggtacgggggcgctaggctcggcctccctcttgctttactctgagcctagagcggcctttccatgatcctaggcttggaattggggggg

SEQ ID NO: 718 - DNA, 2086 bp, Homo sapiens
  misc feature (1863): n equals a,t,g, or c
  misc feature (1913): n equals a,t,g, or c
gtaaacaacaggactataaatatcagagtgtgctgctgtggctttgtggagctgccagagtaaagcaaagagaaaggaagcaggcccgttggaagtggttgtgacaaccccagcaatgtggagaagcctggggcttgccctggctctctgtctcctcccatcgggaggaacagagagccaggaccaaagctccttatgtaagcaacccccagcctggagcataagagatcaagatccaatgctaaactccaatggttcagtgactgtggttgctcttcttcaagccagctgatacctgtgcatactgcaggcatctaaattagaagacctgcgagtaaaactgaagaaagaaggatattctaatatttcttatattgttgttaatcatcaaggaatctcttctcgattaaaatacacacatcttaagaataaggtttcagagcatattcctgtttatcaacaagaagaaaaccaaacagatgtctggactcttttaaatggaagcaaagatgacttcctcatatatgatagatgtggccgtcttgtatatcatcttggtttgcctttttccttcctaactttcccatatgtagaagaagccattaagattgcttactgtgaaaagaaatgtggaaactgctctctcacgactctcaaagatgaagacttttgtaaacgtgtatctttggctactgtggataaaacagttgaaactccatcgcctcattaccatcatgagcatcatcacaatcatggacatcagcaccttggcagcagtgagctttcagagaatcagcaaccaggagcaccaaatgctcctactcatcctgctcctccaggccttcatcaccaccataagcacaagggtcagcataggcagggtcacccagagaaccgagatatgccagcaagtgaagatttacaagatttacaaaagaagctctgtcgaaagagatgtataaatcaattactctgtaaattgcccacagattcagagttggctcctaggagctgatgctgccattgtcgacatctgatatttgaaaaaacagggtctgcaatcacctgacagtgtaaagaaaacctcccatctttatgtagctgacagggacttcgggcagaggagaacataactgaatcttgtcagtgacgtttgcctccagctgcctgacaaataagtcagcagcttatacccacagaagccagtgccagttgacgctgaaagaatcaggcaaaaaagtgagaatgaccttcaaactaaatatttaaaataggacatactccccaatttagtctagacacaatttcatttccagcatttttataaactaccaaattagtgaaccaaaaatagaaattagatttgtgcaaacatggagaaatctactgaattggcttccagattttaaattttatgtcatagaaatattgactcaaaccatattttttatgatggagcaactgaaaggtgattgcagcttttggttaatatgtctttttttttctttttccagtgttctatttgctttaatgagaatagaaacgtaaactatgacctaggggtttctgttggataattagcagtttagaatggaggaagaacaacaaagacatgctttccatttttttctttacttatctctcaaaacaatattactttgtcttttcaatcttctacttttaactaataaaataagtggattttgtattttaagatccagaaatacttaacacgtgaatattttgctaaaaaagcatatataactattttaaatatccatttatcttttgtatatctaagactcatcctgatttttactatcacacatgaataaagcctttgtatctttctttctctaatgntgkatcatactcttctaaaacttgagtggctgkcttaaaagatataaggngaaagtggcctatgtggaagcctaccaggaggtaagggtgagccgaccgcgcctcatttgagaggtggacgggggatatacacgggaaaaaacgttcgggccttgagttcggcggctggggttgctacgcccgcgtggccgcttgaccgcggactcccgctcgcgtcgcaaac

SEQ ID NO: 719 - DNA, 2418 bp, Homo sapiens
  misc feature (1): n equals a,t,g, or c
  misc feature (2): n equals a,t,g, or c
  misc feature (2200): n equals a,t,g, or c
  misc feature (2211): n equals a,t,g, or c
  misc feature (2347): n equals a,t,g, or c
  misc feature (2384): n equals a,t,g, or c
  misc feature (2393): n equals a,t,g, or c
  misc feature (2401): n equals a,t,g, or c
nnggacgcgtgggtacggctgcgagaagacgacagaaggggggagtcaagggcctttgcccgccttggcggccggctctacgttccctgttctcgcctgcagctccgccatggctcctaaaggcagctccaaacagcagtctgaggaggacctgctcctgcaggatttcagccgcaatctctcggccaagtcctccgcgctcttcttcggaaacgcgttcatcgtgtctgccatccccatctggttatactggcgaatatggcatatggatcttattcagtctgctgttttgtatagtgtgatgaccctagtaagcacatatttggtagcctttgcatacaagaatgtgaaatttgttctcaagcacaaagtagcacagaagagggaggatgctgtttccaaagaagtgactcgaaaactttctgaagctgataatagaaagatgtctcggaaggagaaagatgaaagaatcttgtggaagaagaatgaagttgctgattatgaagctacaacattttccatcttctataacaacactctgttcctggtcgtggtcattgttgcttccttcttcatattgaagaacttcaaccccacagtgaactacatattgtccataagtgcttcatcaggactcatcgccctcctgtctactggctccaaatagaccatgtcagcttcaccccctggctttgtgtctatgggtggcctgtggtatatggaaaagtagcagggtggtcagggtgggagacacaagatgtttttatagtctagagcctttaaaaaacccagcagaatgtaattcagtatttgtttattggctgttttttgacagattgttgaaattaaatgaattgaaagggaaactcagagtactaggacgtttattaaaaggaaaaaaatgtcttgcaatgtgctgtaatcacaagaggagaaaataacttgtttccttgatctgtcagaggtcacagtaacctgggccgagctgttattatttattatataatagtagtaggaagttaataactggttctctgtgttccaagcacaatattacaacttcttttgaaccgtaaatatcagaatgaatcctcttcccaggggattgaacagaagcttaatgtttacaagtgtttgaatttgtgatctgaaataacacaaaattaaaaacatgatttctctaattttccaactagaggaagagaaacttgtggaaaagttctttttttttcttttttttttcttaaagaagggcagccaaggtagtaacctaaaaatagtgcccaggcatatgagagttgtcctacgaggttaaagaacacactgttccactgtatggctttggccctgagtggccagggaggtcaacttgaccctgccatgttggtttgacttactaagacacaggaatcattgttttccttgaccagggtctcacaccctggaggaatgttaagtaagagaaagaacctctttcctgaatattgacatgtaaaagaccaaagtaatttttctgaacttctgcaattctgagaactctccaaggaatttacagtgattttagtgcttgtcagcatttttccatgaggactttcatacatttgactctttagttcacaggttcccattgattgtgagcaagatatttatctctttagcccttggggatccagctgagagcaatctcttgcatttttttacccgtgtatgtacagatatcatttcttgtgtatgccatgacttgaaaaagtttgggaagctctttagcaatatcagctaaaaggatatgaaatcacaggtgatagcagttgtcattcagtaatttcctacaagcagcaccccaaaggaaatatagtcctaatctttactatccacttctaaatttaatgtgaatttcatacatgttattagttgttttctttataattttataaaaattattcatcgggagtttaacttccacttccatgctatcggatgtgttgggctccatgcaagaacttggaagaaaaacaggcaggaatgcatttgcataatgacccagatcatcattttctgcaactgagaattatatttcatcattgcttctagaagtctgcaattctttacttttctttggtgcattattatctaggtgccatcactggataatgtggagtgactagagaagtcayatatcactgtaaggtacagttagggntaacactttanaggtttattatttttaaaaaacttttcttgaactcctgggccaacatgggtgaaaccccgtcttcttacttaaaaatacccaaaattaggccaggggcgtggatgggtggggtgcctgttaatcttcagctacttnggggagggcttgaagccagggaggaactgccctgganccccggggngggccagnaggtttgccagttgagt

SEQ ID NO: 720 - DNA, 2541 bp, Homo sapiens
  misc feature (1149): n equals a,t,g, or c
  misc feature (1209): n equals a,t,g, or c
  misc feature (2527): n equals a,t,g, or c
  misc feature (2538): n equals a,t,g, or c
  misc feature (2540): n equals a,t,g, or c
gggagctaggagctggcggcgacggccacaggggcggcgacggcgcagtgcgaagcgaaacagcacccgacagctacaaagtgcaagataagaaaaatgcctccagccgccctgcctctgcaatttcaggacaaaataacaaccactcaggaaataaaccagaccctccgcctgtgttacgtgttgatgaccggcagcggctggcccgggagcgacgtgaggaacgggagaaacagctagctgcaagagaaatagtgtggttagaaagagaagagcgagccaggcagcactacgagaagcacctggaagagcggaagaagaggttggaggagcagaggcagaaggaggagcggaggagggctgctgtggaggagaagcggaggcagagacttgaggaggacaaagaacgccacgaagctkttgtacggcgcacaatggaaaggagccagaagccaaaacagaagcataaccgttggtcgtggggaggctctytccatgggarccctagcatccacagtgcagctcgccgcctgcagctcagcccatgggagagcagcgttgttaacagactcctgacgcccacacattcgttcctggccagaagtaaaagcacagctgccttgtctggagaagcagcatcttgcagccccatcatcatgccctacaaagctgcacactctagaaattcgatggatcgaccaaaactctttgtaacaccacctgagggctcttctcgcaggaggatcattcatggcacagcgagctataaaaaagaaagagagagagaaaatgtactcttcctcacatctggcacccgaagggctgtatctccatctaatcccaaagcaagacaaccagctcgctcccgactttggcttccgtccaagtctcttcctcatttgcctggcacacccagaccgacatcctccttgccacccggctcagtcaaagctgctcctgctcakgtccggcccccatcccccggcaacatccgccctgtcaagagggaagtcaaagtggagcctgagaagaaagatcctgagaaggaacctcagaaagttgccaatgagccctcactaaagggcagagcacctttagtgaaggtagaagaagccacagttgaagagcggacacctgctgaaccagaanttggcctgctgctccagccatggccccagctccagcctcggccccagctycagcctcggncccagctccagccccggtccccaccccagccatggtctcagccccgtcatccactgtgaatgccagtgcttctgttaagacttctgcaggcaccaccgacccagaggaggccacaaggcttctagctgagaagaggcggctggcccgagagcagagagaaaaggaagaaagggagaggagggagcaggaagagcttgaaagacaaaagagagaggaattggctcaacgtgtggctgaagagaggacgactcgccgtgaggaggagtcgcgcaggctggaagccgagcaggcccgggagaaggaggagcagctgcagcggcaggcggaggagcgggcgctgcgcgagtgggaggaggcagagcgcgcccagaggcagaaagaagaagaagctcgcgttcgtgaagaagcagagagggtccggcaggaacgagagaagcatttccagagagaagagcaagagcgcctggagagaaagaagcgacttgaggagattatgaaaagaaccaggagaacagaagctacagataagaaaaccagtgatcagagaaacggtgatatagccaagggagctctcactggaggaacagaggtgtctgcacttccatgtacaacaaacgctccgggaaatggaaagccagttggcagcccacatgtggttacctcacaccagtcaaaagtgacagtggagagcactcccgatttggaaaaacaaccaaatgaaaatggtgtatctgttcagaatgaaaattttgaagaaattataaacttacccattggatctaaaccatccagattagatgtcaccaacagtgagagcccagaaattcctttgaatccaattttggcctttgatgatgaagggacacttgggcccctgcctcaggtagatggtgttcagacacagcagactgcagaagttatatgagtgtttcttctgaagaaccaaagctgaaatttaatgagaatttctacaattaatggaattcctttcctgctataaaggagcatcccctccacccgttttctagagttcttgaccatcattttgaaaagatttattaaaactagctaaagacaacagactggatagcttttctaataatttcatcaataggaaaaaagaaatacgtctcattcttcaatactttaaaatggctttttccagtgtgctccttcttagcaatcaatatttttctgcattctttaaaagacaagagaatttgggttataaaagaaatgggctgactargcakgattttttkggtcttaaaagcttaacatgtaaaattggcaaaaaaaaaaaaaagggggggccgcnctaaaggaccnang

SEQ ID NO: 721 - DNA, 2171 bp, Homo sapiens
  misc feature (5): n equals a,t,g, or c
  misc feature (1996): n equals a,t,g, or c
tcganccacgacgtccgggacgctggactttgatgaagttgtgaatgatgcagatatcattctggtggagttttatgccccatggtgtggacactgcaagaaacttgcccccgagtatgagaaggccgccaaggagctcagcaagcgttctcctccaattcccctggcaaaggtcgacgccaccgcagaaacagacctggccaagaggtttgatgtctctggctatcccaccctgaaaattttccgcaaaggaaggccttatgactacaacggcccacgagaaaaatatggaatcgttgattacatgatcgagcagtccgggcctccctccaaggagattctgaccctgaagcaggtccaggagttcctgaaggatggagacgatgtcatcatcatcggggtctttaagggggagagtgacccagcctaccagcaataccaggatgccgctaacaacctgagagaagattacaaatttcaccacactttcagcacagaaatagcaaagttcttgaaagtctcccaggggcagttggttgtaatgcagcctgagaaattccagtccaagtatgagccccggagccacatgatggacgtccagggctccacccaggactcggccatcaaggacttcgtgctgaagtacgccctgcccctggttggccaccgcaaggtgtcaaacgatgctaagcgctacaccaggcgccccctggtggtcgtctactacagtgtggacttcagctttgattacagagctgcaactcagttttggcggagcaaagtcctagaggtggccaaggacttccctgagtacacctttgccattgcggacgaagaggactatgctggggaggtgaaggacctggggctcagcgagagtggggaggatgtcaatgccgccatcctggacgagagtgggaagaagttcgccatggagccagaggagtttgactctgacaccctccgcgagtttgtcactgctttcaaaaaaggaaaactgaagccagtcatcaaatcccagccagtgcccaagaacaacaagggacccgtcaaggtcgtggtgggaaagacctttgactccattgtgatggaccccaagaaggacgtcctcatcgagttctacgcgccatggtgcgggcactgcaagcagctagagcccgtgtacaacagcctggccaagaagtacaagggccaaaagggcctggtcatcgccaagatggacgccactgccaacgacgtccccagcgaccgctataaggtggagggcttccccaccatctacttcgcccccagtggggacaaaaagaacccagttaaatttgagggtggagacagagatctggagcatttgagcaagtttatagaagaacatgccacaaaactgagcaggaccaaggaagagctttgaaggcctgaggtctgcggaaggtgggaggaggcagacgccctgcgtggcccatggtcggggcgtccacgccgaggccggcaacaaacgacagtatctcggattcctttttttttttttttaattttttatactttggtgtttcacttcatgctctgaatactgaataaccatgaatgactgaatagtttagtccagatttttacagaggatacatctatttttatcattatttggggtttgaaaaatttttttttacaccttctaatttctttatttctcaaagcagataattcttctgtgtgaaaatgttttctttttttaatttaaggtttaaaattccttttccaaatcatgttgattttgctctttgctttttcgttgtctgagaaattgttggcgtagatttggcttctggtatgtgtttctgattgcttcctgttgagcacaaagtgagagctgccactgagcagccctgccaggggtgctgtttcaggctgggcatcscaggcggcctccctgcaaaccaagggctgggggcaaaggggcatgatccagggtcccccagggtgggctcagctccagggagangccacccacgtggcagccccacctcttgagagcccccagtgccggagcagaaaggaccctggacccagaggcagatactgcggggtggtagaaaaggtagagtaggctgtggcaatggaataaaacacgattaaaaacgttaaraaaaaaaaaaaaaaaaaaaaaaaaaaaaaaa

SEQ ID NO: 722 - DNA, 1888 bp, Homo sapiens
  misc feature (787): n equals a,t,g, or c
  misc feature (1875): n equals a,t,g, or c
  misc feature (1878): n equals a,t,g, or c
gggctgcaggaattcggcmgmggcggggtgggtgcaagatgccgctgccggttcaggtgtttaacttgcagggggccgtggagcccatgcagatcgacgtggacccccaggaagacccgcagaatgcacctgacgtcaactacgtggtggagaaccccagcctggatctggaacagtacgcggccagctacagcggcctgatgcgcatcgaacggctgcagttcattgctgatcactgccccacgctgcgggtggaggccctgaagatggccctctccttcgtgcagagaacctttaacgtggacatgtacgaggagatccaccgcaagctctcagaggccaccagggagctgcagaacgcacccgacgccatccctgagagcggcgtggagcccccagccctggacacggcctgggtggaggccacgcggaagaaggcgctgctgaagctggagaagctggacacagacctgaagaactacaagggcaactccatcaaagagagcatccggcgcggccacgacgacctgggcgaccactacctggactgtggggacctcagcaacgccctcaagtgctattcccgggcccgggactactgcaccagcgccaaacacgtcatcaacatgtgcctcaatgtcatcaaggtcagcgtctacttgcagaattggtctcatgtgctcagctacgtcagcaaggctgagtccaccccagagattgccgagcagcgaggagagcgtgacagccagacccaggccatcctcaccaagctcaagtgtgccgcagnttggcagagctggccgccaggaagtacaagcaggctgccaagtgcctcctgctggcttcctttgatcactgtgacttccctgagctgctgtcccccagcaacgtggccatctacggtggcctgtgcgccttggctacctttgaccggcaggagctgcagcgcaatgtcatctccagcagctccttcaagttgttcttggagctggagccacaggtccgagacatcatcttcaaattctacgagtccaagtacgcctcatgtctcaagatgctggacgagatgaaggacaacctgctcctggacatgtatctggccccccatgtcaggaccctgtacacccagattcgcaaccgtgccctcatccagtatttcagcccctacgtgtcagccgacatgcataggatggcggcagcyttcaataccacggtggccgccctggaggacgagctgacgcagctaatcctggaggggctgatcagtgcccgtgtggactcacacagcaagatcctatacgcccgggacgtggatcagcgcagcaccacctttgagaagtctctgttgatgggcaaggagttccagcgccgcgccaaggccatgatgctgcgggcagctgtgctccgcaaccagatccatgtcaagtccccgcccagagaagggagccagggggagctgactccagccaacagccagtcccggatgagcaccaacatgtgaggggtgaaccttggcctccaggacatctgcaccccctccccacctccacggacctcggacctccaggcggctcagtgctgcstgcggcccagctaaggggcctggccactgggtgccacccagcctgtgtgccctccctggggctgaggaggcaggcggctgctagttgtggcccttcctggaaggagaggcctgcagggctcgaccctgtgggtttctgtccccagggagcagactgtgcggcacccaggcccagtggcaccatttcccagacccctcctgttcccgcctcagtcaggtgcagacaagtgggcggtgtccattaaagagcagactcagcgttaaaaaaaaaaaaaaaaaaaaaaaaaaaaccncgnggggggcccc

SEQ ID NO: 723 - DNA, 980 bp, Homo sapiens
  misc feature (968): n equals a,t,g, or c
  misc feature (972): n equals a,t,g, or c
ttcaagtgattgtcccacctcagcctcctgaatagctgggattacaggtgcatgctaccatgcctggctactttttgtgtttttagcagagacagggtttcaccatgttggtcagggtggtctcgaactcctgacctcaagtggtccgtctggctcggcctcccaaggtgctgggattacaggtgtgagccactgcacctggcctatataggcttttttcttaaacctatttagtaatgttttcccaagtttattttttatttttaattttttccccaagtttatttttctatttttttttcatggaaaaatggggtaacttagcagtttcaatattgaagactgaagtttaaaaaaaatttaaattcaaggtacttttaaaattcagttagaaaagtaggctttaaaaattattagagacaagagtaccaaagcggtgtgtgtatgtgtgtgtgtgtatgcatgcttgtggattggaaaaactttggagactgattacttttcattatatatgtgtcacagtgaaacagcttttatgtgtcatgtaagattactgcttgcctctctaaggaaggtcgtgactgtttaaatagacgggcaaggtggaaccttttgaaagatgagcttttgaatataagttgtctgctagatcatggtttgtattgaactaacaaggtttgcagatctgctgacttatataaagctttttgattcctactaagctttaagatttaaaaaatgttcaatgttgaaatttctgtggggctctatttttgctttggctttctggtgagagagtgaggaagcattctttccttcactaagtttgtctttcttgtcttctggatagattgattttaagagactaagggaatttacaaactaaagattttagtcatctggtggaaaaggagactttaagattgtttagggctgggcggggtgactcacatctgtrrtcccagcantttngggaggcc

SEQ ID NO: 724 - DNA, 1812 bp, Homo sapiens
cgcccggctccatcttgcgggagaccgggttgggctgtgacgctgctgctggggtcagaatgtcatacccaggctatcccccaacaggctacccacctttccctggatatcctcctgcaggtcaggagtcatcttttcccccttctggtcagtatccttatcctagtggctttcctccaatgggaggaggtgcctacccacaagtgccaagtagtggctacccaggagctggaggctaccctgcgcctggaggttatccagcccctggaggctatcctggtgccccacagccagggggagctccatcctatcccggagttcctccaggccaaggatttggagtcccaccaggtggagcaggcttttctgggtatccacagccaccttcacagtcttatggaggtggtccagcacaggttccactacctggtggctttcctggaggacagatgccttctcagtatcctggaggacaacctacttaccctagtcagcctgccacagtgactcaggtcactcaaggaactatccgaccagctgccaacttcgatgctataagagatgcagaaattcttcgtaaggcaatgaagggttttgggacagatgagcaggcaattgtggatgtggtggccaaccgttccaatgatcagaggcaaaaaattaaagcagcatttaagacctcctatggcaaggatttaatcaaagatctcaaatcagagttaagtggaaatatggaagaactgatcctggccctcttcatgcctcctacgtattacgatgcctggagcttacggaaagcaatgcagggagcaggaactcaggaacgtgtattgattgagattttgtgcacaagaacaaatcaggaaatccgagaaattgtcagatgttatcagtcagaatttggacgagaccttgaaaaggacattaggtcagatacatcaggacattttgaacgtttacttgtgtccatgtgccagggaaatcgtgatgagaaccagagtataaaccaccaaatggctcaggaagatgctcagcgtctctatcaagctggtgaggggagactagggaccgatgaatcttgctttaacatgatccttgccacaagaagctttcctcagctgagagctaccatggaggcttattctaggatggctaatcgagacttgttaagcagtgtgagccgtgagttttccggatatgtagaaagtggtttgaagaccatcttgcagtgtgccctgaaccgccctgccttctttgctgagaggctctactatgctatgaaaggtgctggcacagatgactccaccctggtccggattgtggtcactcgaagtgagattgaccttgtacaaataaaacagatgttcgctcagatgtatcagaagactctgggcacaatgattgcaggtgacacgagtggagattaccgaagacttcttctggctattgtgggccagtaggagggatttttttttttttaatgaaaaaaaatttctattcatagcttatccttcagagcaatgacctgcatgcagcaatatcaaacatcagctaaccgaaagagctttctgtcaaggaccgtatcagggtaatgtgcttggtttgcacatgttgttattgccttaattctaattttattttgttctctacatacaatcaatgtaaagccatatcacaatgatacagtaatattgcaatgtttgtaaaccttcattcttactagtttcattctaatcaagatgtcaaattgaataaaaatcacagcaatctctgaaaaaaaaaaaaaaaaaaaaaaaaaaaaaaaaaaaaaaa

SEQ ID NO: 725 - DNA, 974 bp, Homo sapiens
cccggaacgtgatcgaggcttgtttgcagaccggaacacggttcctggtctacaccagcagcatggaagttgtggggcctaacaccaaaggtcaccccttctacaggggcaacgaagacaccccatacgaagcagtgcacaggcacccctatccttgcagcaaggccctggccgagtggctggtcctggaggccaacgggaggaaggtccgtggggggctgcccctggtgacgtgtgcccttcgtcccacgggcatctacggtgaaggccaccagatcatgagggacttctaccgccagggcctgcgcctgggaggttggctcttccgggccatcccggcctctgtggagcatggccgggtctatgtgggcaatgttgcctggatgcacgtgctggcagcccgggagctggagcagcgggcagccctgatgggcggccaggtatacttctgctacgatggatcaccctacaggagctacgaggatttcaacatggagttcctggggcccctgcggactgcggctggtgggcgcccgcccattgctgccctactggctgctggtgttcctggctgccctcaatgccctgctgcagtggctgctgcggccactggtgctctacgcacccctgctgaacccctacacgctggccgtggccaacaccaccttcaccgtcagcaccgacaaggctcagcgccatttcggctatgagcccctgttctcgtgggaggatagccggacccgyaccattctctgggtacaggccgctacgggttcagcccagtgacggtggggctggggcctggaggcccagatacagcacatccacccaggtcccgagccctcacaccctggacgggaagggacagctgcattccagagcaggaggcagggctctggggccagaatggctgtccttgtcgtagagccctccacattttctttttcttttttgagacagggtcttgctctgtt

SEQ ID NO: 726 - DNA, 1508 bp, Homo sapiens
  misc feature (9): n equals a,t,g, or c
  misc feature (309): n equals a,t,g, or c
  misc feature (360): n equals a,t,g, or c
gaggagatnctgaggtgtttgagtgtccttcccgcactcagagggcctctctggagccagttccaggccacccatgggccttggcaccgccccctactcatggctggcagattcgtggccccacccatctcgaagcccctcggcccaggaacccaggggaagctgctgccctagcaatcctgacccggacgacagatattacaacggtgaggagttctcattccctcacctggcttcagcgcacttctcccgacctactggggcaaaccgaaggcgcccgggagccggtctctctgargagcaasggangcaaagtgaagcttctgggggaaactgtgcagatgccctctctgaactggncagaagcctgcccccacctcctccttcttgtgaactgagctgccttagaagggccggaggaggagctggagggcagctcagagccagaggagtggtgcccgccaatgcctgagagaagtcacctgacggagcccagctccagtggagggtgcctggtcaccccatcccgaagggaaaccccctctcccacaccttcctatggacagcagtccacagccactcttacaccctcacctcctgaccctccccagcccccaactgacatgccccatctccatcagatgcccaggarggtgccccttgggccgagttcccctctcagtgtatcccagcccatgctgggcatccgtgaagcgaggcctgctggcttgggtgctggccctgcagcctcaccccacctcagccccagtcctgcccctagcacagccagcagtgccccaggcagaacctggcaggggaatggggagatgactcccccacttcaaggaccccgtgctcgattccggaagaaacccaaggctcttccctacaggagggagaacagtcctggggacttgcccccaccacccttgccaccgccagaggaagaggcgagctgggccctagagctgagggcagcaggcagcatgtcctccctggagcgggagcgcagtggggagaggaaagcggtccaggccgtgcccctggcagcccagcgggtgctccacccagatgaagaggcctggctcccatacagcagaccaagcttcctgtcccggggccagggcaccagcacatgttccacggccggcagcaactcttccaggggctccagcagctctaggggctcccggggccctggccggagccggagtcggagtcagagccggagccagagccaaaggccaggacagaaacgccgagaggaaccaagatgacccttgttggggcattgagaatatcatgagtgccacggggaaggggagtagggatgtcttttcccccccagcagtgatgagtggggctagctgaagcccattggtttccacgatttcaattggctgagaaggcagagagctagctcctccctttctttctttttccacctgagacttgtttataaaaaacaaaacaataaaaagagtctgatcagaaaactctgccgaatt

SEQ ID NO: 727 - DNA, 2004 bp, Homo sapiens
gagagagtgccgtatttcgcagattggagctgagctgtggctgccagaagatagcgaacgataatctggccctgtgttttaaaaggtacaaagaaactaaagctatgatccctaacatagaaggaatggaaactgaaagtggaaatcaggaaaagatgttgatatatcactacttgtgtcttttaacaaaatgaaaaaattgactactgatgggaagttaattgccagagcattgagaagttcagctgttgtagagcttgatttggaaggcaccagaatccggaggaaaaaacctctgggggaaagaccaaaggatgaggatgaacgcacagtgtatgtggagttacttcccaaaaatgttaatcacagctggattgaaagagtatttgggaaatgtggcaatgttgtttatataagtataccacattataagtctactggagatccaaagggatttgcgtttgtggaatttgaaacaaaagaacaagcagcaaaagcaattgagtttcttaacaacccaccagaagaagcaccaagaaaacctggcatatttcctaaaacagtgaaaaataagcccattccagccttaagagttgtggaagagaagaaaaagaaaaagaagaagaaaggccgaatgaaaaaggaagacaatatccaagccaaagaagaaaacatggacacaagcaacaccagcatcagtaaaatgaaaagatccagacccacatctgagggctctgacattgagtccactgaaccccaaaagcagtgctcaaagaaaaagaaaaaacgggacagagttgaagcatctagcttacctgaagtcagaacagggaagaggaagagaagcagctctgaagatgcagaatccctagctccccgatcaaaagtaaagaaaattattcagaaagacatcattaaggaagcatcagaagcttccaaggaaaatagagatatagaaatctctactgaagaggaaaaggatactggagatctaaaagatagctctctcttgaaaacaaaaaggaaacataagaaaaaacataaagagagacataaaatgggagaagaagttataccattaagagtgctatcaaagagcgaatggatggatttgaaaaaagagtatttagcgctacaaaaagctagcatggcttctttaaaaaaaacaatatcccaaataaaatcagagtcagaaatggaaacagacagtggagtacctcaaaacactggaatgaaaaatgaaaaaacagccaacagggaagagtgtcgcacccaggagaaagttaatgcaacaggaccacagttcgtgagtggagtgattgtgaagatcattagcacagagcctctacctggcaggaaacaagtccgggatactttggcagcaatctcagaagttctttatgttgatttgctagaaggggatacagaatgccatgctagatttaaaactcctgaggatgctcaagcagtaataaatgcctatacagaaattaacaagaaacactgctggaaactcgagatcctttctggtgatcacgaacaaaggtattggcagaagattttggttgatagacaggcaaaacttaatcagcctcgggaaaagaaaagaggcactgaaaagttaatcaccaaagctgaaaagattagactggcaaagactcaacaagcgagtaaacatataagattttctgaatatgattgaaaaaaaaaacagttcacctcttaatacttcacaagatacttgagctgttcttgggagattcacttttattatggtagcactgcataattaatgtgtttttaattaaaagaaatatctttgttcctcaacttgtaaataagacttttttctagagacaaatatgatgtataccacaatttttcttaaacattttatttgttgaaattatcttagatgtcagtgtcaggtgatttagtaaataaatgtgttttgaacattaaaaaaaaaamaaaaaaaaactcgaggggragcccggmccccaa

SEQ ID NO: 728 - DNA, 1470 bp, Homo sapiens
ctttcccggagctcagtgggcgtcgcgcgaaggctaagggagtgtggcgggcggctccgggagccaacatgcctcggtatgcgcagctggtcatgggccccgcgggcagcgggaagagcacctactgtgccaccatggtccagcactgtgaagccctcaaccggtctgtccaagttgtaaacctggatccagcagcagaacacttcaactactccgtgatggctgacatccgggaactgatcgaggtggatgatgtaatggaggatgattctctgcgattcggtcccaacggaggattggtattttgcatggagtactttgccaataattttgactggctggagaactgtcttggccatgtagaggacgactatatcctttttgattgtccaggtcagattgagttgtacactcacctgcctgtgatgaaacagctggtccagcagctcgagcagtgggagttccgagtctgtggagtttttcttgttgattctcagttcatggtggagtcattcaagtttatttctggcatcttggcagccctgagtgccatgatctctctagaaattccgcaagtcaacatcatgacaaaaatggatctgctgagtaaaaaagcaaaaaaggaaattgagaaatttttagatccagacatgtattctttattagaagattctacaagtgacttaagaagcaaaaaattcaagaaactgactaaagctatatgtggactgattgatgactacagcatggttcgatttttaccttacgatcagtcagatgaagaaagcatgaacattgtattgcagcatattgattttgccattcaatatggagaagacctagaatttaaagaaccaaaggaacgtgaagatgagtcttcctctatgtttgacgaatattttcaagaatgccaggatgaatgaagagtttactaaaagtaaccatctaaagagcttgtggccaaaccagcagaacattcttctcttcaaaggatgcaatagtagaaagctacttattttaatgaaaaaaagtaaaacttcgttctttatcagcctcatgcctgaatcaaatttttaattattctgaaactgctgctgtttaaagtggaatcttttagtattataacagcatcactttagattttgtaagtcaaaattgaaatgaatgcacatagatttatatataaattagcacctgagctaaggttaaggctggtctaaacttattttcactttttgtattatttttgagatgcaggaattactgtaacaaaatatgtatgtccgaagggaaaaagctgcaaggatatatataagaccactgcttatctgtatcttcccattttcctatattgaaaatgtatattatttatataacttaaaaagtaaaaataactatgttttgagatatgtatgtgtatatataaaagaaacaaaggtttttaatgattcttggacctagataacaagt

SEQ ID NO: 729 - DNA, 1755 bp, Homo sapiens
agccgcgagtccattttggggctgtgcttggcgcgtaccgtgcggtccctgtagttggaggacgggcggtcgcgcggcctttcccactagccggagtagcctctagttcgttagtcaaaacgtgaaaaaaaagacctgctttgccctgggaaatagtaaccctgccaaatacatcagcttgtaggagacagaggatgtgatggagctgcttgaagaagatctcacatgccctatttgttgtagtctgtttgatgatccacgggttttgccttgctcccacaacttctgcaaaaaatgcttagaaggtatcttagaagggagtgtgcggaattccttgtggagaccagctccattcaagtgtcctacatgccgtaaggaaacttcagctactggaattaatagcctgcaggttaattactccctgaagggtattgtggaaaagtataacaagatcaagatctctcccaaaatgccagtatgcaaaggacacttggggcagcctctcaacattttctgcctgactgatatgcagctgatttgtgggatctgtgctactcgtggggagcacaccaaacatgtcttctgttctattgaagatgcctatgctcaggaaagggatgcctttgagtccctcttccagagctttgagacctggcgtcggggagatgctctttctcgcttggataccttggaaactagtaagaggaaatccctacagttactgactaaagattcagataaagtgaaggaattttttgagaagttacaacacacactggatcaaaagaagaatgaaattctgtctgactttgagaccatgaaacttgctgttatgcaagcatatgacccagagatcaacaaactcaacaccatcttgcaggagcaacggatggcctttaacattgctgaggctttcaaagatgtgtcagaacccattgtatttctgcaacagatgcaggagtttagagagaaaatcaaagtaatcaaggaaactcctttacctccctctaatttgcctgcaagccctttaatgaagaactttgataccagtcagtgggaagacataaaactagtcgatgtggataaactttctttgcctcaagacactggcacattcattagcaagattccctggagcttttataagttatttttgctaatccttctgcttggccttgtcattgtctttggtcctaccatgttcctagaatggtcattatttgatgacctggcaacttggaaaggctgtctttcaaacttcagttcctatctgactaaaacagccgatttcatagaacaatcagttttttactgggaacaggtgacagatgggtttttcattttcaatgaaagattcaagaattttactttggtggtactgaacaatgtggcagaatttgtgtgcaaatataaactattataaaatctgtttcaagtatgcagttttcttttgttagaaattgttagagaatagagagtggtaattcagatttggtcaacgattctagtcacatattttcctccaaaagtattccttccaaaaataatctatacatgttcaaattaggtagcataaagataaaagtgaaatttagtagtataggcctgaacctttttttgtttaaaagagtgcttttgaaataagcatccaccccaaatgttggttgtatttatgctgtgataaaaataggtgagagatcatatgatctaatattgtattgatggaagtataggtagtatagtagtgattgttct

SEQ ID NO: 730 - DNA, 437 bp, Homo sapiens
gttttcttttctccttccacctttcttttcatttctagtgagacacacgctttggtcctggctttcggcccgtagttgtagaaggagccctgctggtgcaggttagaggtgccgcatcccccggagctctcgaagtggaggcggtaggaaacggagggcttgcggctagccggaggaagctttggagccggaagccatggcacactaccccacaaggctgaagaccagaaaaacttattcatgggttggcaggcccttgttggatcgaaaactgcactaccaaacctatagagaaatgtgtgtgaaaacagaaggttgttccaccgagattcacatccagattggacagtttgtgttgattgaaggggatgatgatgaaaacccgtatgttgctaaattgcttgagttgttcgaagatgactctgatcctcctccgt

SEQ ID NO: 731 - DNA, 3663 bp, Homo sapiens
  misc feature (3583): n equals a,t,g, or c
  misc feature (3601): n equals a,t,g, or c
  misc feature (3619): n equals a,t,g, or c
  misc feature (3648): n equals a,t,g, or c
tcgacccacgcgtccgcattgagataattactgataggcagtctggaaagaaaagaggctttggctttgttacttttgatgaccatgatcctgtggataaaatcgtattgcagaaataccataccatcaatggtcataatgcagaagtaagaaaggctttgtctagacaagaaatgcaggaagttcagagttctaggagtggaagaggaggcaactttggctttggggattcacgtggtggcggtggaaatttcggaccaggaccaggaagtaactttagaggaggatctgatggatatggcagtggacgtggatttggggatggctataatgggtatggaggaggacctggaggtggcaattttggaggtagccccggttatggaggaggaagaggaggatatggtggtggaggacctggatatggcaaccagggtgggggctacggaggtggttatgacaactatggaggaggaaattatggaagtggaaattacaatgattttggaaattataaccagcaaccttctaactacggtccaatgaagagtggaaactttggtggtagcaggaacatggggggaccatatggtggaggaaactatggtccaggaggcagtggaggaagtgggggttatggtgggaggagccgatactgagcttcttcctatttgccatgggcttcactgtataaataggagaggatgagagcccagaggtaacagaacagcttcaggttatcgaaataacaatgttaaggaaactcttatctcagtcatgcataaatatgcagtgatatggcagaagacaccagagcagatgcagagagccattttgtgaatggattggattatttaataacattaccttactgtggaggaaggattgtaaaaaaaaatgcctttgagacagtttcttagctttttaattgttgtttctttctagtggtctttgtaagagtgtagaagcattccttctttgataatgttaaatttgtaagtttcaggtgacatgtgaaaccttttttaagatttttctcaaagttttgaaaagctattagccaggatcatggtgtaataagacataacgtttttcctttaaaaaaatttaagtgcgtgtgtagagttaagaagctgttgtacatttatgatttaataaaataattctaaaggaaattgtgtaattatagactttttattttaaataagttaaggagtgggtagtataattaaggtccgttgcaaagctgttgttatatttgtataagataaatgctggtcagatgtaagtgtgttgtctgcaattcatcaggattaaattatgtagataacttaagggatatctctgcaaggagaaacacctttttagatcttttagatgctgcttcttcaatgcaaggaaaggaaataaccccagcgaggtactcttcagggacacaggtctagtacaagagaactcttgacggctactaagttcagccagtcttaaaaaactgtgctgtttctacaaaactttaactacagtagtttataaggatgccaacgaaagctgagggtgtagagcaaaatagttctaagcttcagttaaacttctttaggtaagatcttatttacttttcctttcttaattttcctccctaaaagataaactaatactcttaaatggtctttcagtatagtggttcttacgtagtttaacatagctataaattgagtttaacaatttataaactcaagagaataatttttataaaccctgttttccaatctgtcatttacttaaattattttggttgtttttccctttttttccttcttttcccaccccctccccctccatgtgaagatttgggtgcttaacatatcatttttttccctgccggaattttagcattgatatgaaccatggacaagtatattctgctgccacaaagactgtaaagtgcttcatttcaacagctgaggcaagccaagtgatcattaataaagcttttcttggttccttcagtggtgttggtagtaaaatggtaggtaaaagttaggctgcaagttcaataaatcatgagatttcccatcgttacacccttgtgtattcacatttcttggatcaaacattttgagtgaactaggggtttttattaaagacatttgttgtatttatggttgtaactgtacatgcttatcaggatgagactgaaagaaggtagggcaaaaatggttgaatctattttcagatagtagttcatacttgagtgaagtgtcttgtctgcattatgaagcctggtatgtatccagtactaaataggtgggttaaatgtggtaattctagttcagtgtcttaccctgaagagaaagttgtaggttggctgttgaaattcattccttagatatgatcagtttgattgcccggctttattgcctttacaggaatgtgatactcagggcttactctatacaccaatgagtcttctttgatcctaagaccaccactgaagttgtttaggttcttttggacaaacatgataaacttcttcagatactttttttttcctttggcaggaaggtgtcttgctgcaggtaactaatgaagaagtggtcaaccacagagtcttcaagaaataagaaattctgtaccatctgaaagtagttcttgttggtgccttcatttaaaaagcactctttaaaataaaagggaaatgttttctgataaaacaaacatttagttgaggttcttgatataaaacaattacaaaatgagtgttgtttgtaaaacagtaacatcaaattggctagagagataaatgtatcatgttttaaattaggttttgtgagtagacagattacaattctattttaaatataaagtttataaaataaatactttttgtatccaaatacttggtgtaatgtttacacataaaatgtgtgaatcttgttctataaatatttggttgtctaaaagatcaccatcccctaaatttttaaaagcagtttcacaaagctatgcatattttaatattaacaggtaaatgagaagagcattgtggacattattggctgtccccaataaaatgctgttcattatgcactgtatattcagcgtttgagtactcctaaagtttctggctttacttttacgtttagcaatactggtggcattttgaaaatcatggattttaaaggttaaccggctggagtggtccagattaagtggctttgcagaagcactgaggtttacaatatgtgctagattgtcaaatgtcaattagttttattgtggtttacactgagtaaatgaatatcagtgttgctttttaaatgtgtttatttggacatttatctgaattaagaaaaccaaaaagaccaggttaatttgtttctatgataatttgttttggttttgataatgtgaggtatctaacaggtaagtcaaatttaacagcaggtaacacatagaaagcagctttctgtttgaaatagctgagttcgtcaattaaagacgtacaaatatcccaactttaagaaaattttgaaggtttaaaaatgtgtggatgtcaaagacgttgaactttgaaatacatcangttgatatgcataacctnaaaataccaactcctatncagccaagggtcaagggaatattacacanatagggggagaatta

SEQ ID NO: 732 - DNA, 2017 bp, Homo sapiens
ggtgacttaggacggggcgatggcggctgagaggagctgcgcgtgcgcgaacatgtaactggtgggatctgcggcggctcccagatgatggtcgtcctcctgggcgcgacgaccctagtgctcgtcgccgtggcgccatgggtgttgtccgcagccgcaggtggaaaaaatctaaaatctcctcaaaaagtagaggtcgacatcatagatgacaactttatcctgaggtggaacaggagcgatgagtctgtcgggaatgtgactttttcattcgattatcaaaaaactgggatggataattggataaaattgtctgggtgtcagaatattactagtaccaaatgcaacttttcttcactcaagctgaatgtttatgaagaaattaaattgcgtataagagcagaaaaagaaaacacttcttcatggtatgaggttgactcatttacaccatttcgcaaagctcagattggtcctccagaagtacatttagaagctgaagataaggcaatagtgatacacatctctcctggaacaaaagatagtgttatgtgggctttggatggtttaagctttacatatagcttasttatctggaaaaactcttcaggtgtagaagaaaggattgaaaatatttattccagacataaaatttataaactctcaccagagactacttattgtctaaaagttaaagcagcactacttacgtcatggaaaattggtgtctatagtccagtacattgtataaagaccacagttgaaaatgaactacctccaccagaaaatatagaagtcagtgtccaaaatcagaactatgttcttaaatgggattatacatatgcaaacatgacctttcaagttcagtggctccacgcctttttaaaaaggaatcctggaaaccatttgtataaatggaaacaaatacctgactgtgaaaatgtcaaaactacccagtgtgtctttcctcaaaacgttttccaaaaaggaatttaccttctccgcgtacaagcatctgatggaaataacacatctttttggtctgaagagataaagtttgatactgaaatacaagctttcctacttcctccagtctttaacattagatcccttagtgattcattccatatctatatcggtgctccaaaacagtctggaaacacgcctgtgatccaggattatccactgatttatgaaattattttttgggaaaacacttcaaatgctgagagaaaaattatcgagaaaaaaactgatgttacagttcctaatttgaaaccactgactgtatattgtgtgaaagccagagcacacaccatggatgaaaagctgaataaaagcagtgtttttagtgacgctgtatgtgagaaaacaaaaccaggaaatacctctaaaatttggcttatagttggaatttgtattgcattatttgctctcccgtttgtcatttatgctgcgaaagtcttcttgagatgcatcaattatgtcttctttccatcacttaaaccttcttccagtatagatgagtatttctctgaacagccattgaagaatcttctgctttcaacttctgaggaacaaatcgaaaaatgtttcataattgaaaatataagcacaattgctacagtagaagaaactaatcaaactgatgaagatcataaaaaatacagttcccaaactagccaagattcaggrrattattctaatgaagatgaaagcgaaagtaaaacaagtgaagaactacagcaggactttgtatgaccagaaatgaactgtgtcaagtataaggtttttcagcaggagttacactgggagcctgaggtcctcaccttcctctcagtaactacagagaggacgtttccctgtttagggaaagaaaaaacatcttcagatcataggtcctaaaaatacgggcaagctcttaactatttaaaatggaattacaggccgggcacgtggctcacactgtaatccagcactttggaggctgaggaggcagacatgaggtcagagatcgaga

SEQ ID NO: 733 - DNA, 2004 bp, Homo sapiens
  misc feature (2001): n equals a,t,g, or c
cggacgcgtgggagctgagtcgaggtggaccctttgaacgcatcgccctacagccgctgattccccccgcatcgcctcccgtggaagcccaggcccgcttcgcagctttctccctttgtctcataaccatgtccaccaacgagaatgctaatacaccagctgcccgtcttcacagattcaagaacaagggaaaagacagtacagaaatgaggcgtcgcagaatagaggtcaatgtggagctgaggaaagctaagaaggatgaccagatgctgaagaggagaaatgtaagctcatttcctgatgatgctacttctccgctgcaggaaaaccgcaacaaccagggcactgtaaattggtctgttgatgacattgtcaaaggcataaatagcagcaatgtggaaaatcagctccaagctactcaagctgccaggaaactactttccagagaaaaacagccccccatagacaacataatccgggctggtttgattccgaaatttgtgtccttcttgggcagaactgattgtagtcccattcagtttgaatctgcttgggcactcactaacattgcttctgggacatcagaacaaaccaaggctgtggtagatggaggtgccatcccagcattcatttctctgttggcatctccccatgctcacatcagtgaacaagctgtctgggctctaggaaacattgcaggtgatggctcagtgttccgagacttggttattaagtacggtgcagttgacccactgttggctctccttgcagttcctgatatgtcatctttagcatgtggctacttacgtaatcttacctggacactttctaatctttgccgcaacaagaatcctgcacccccgatagatgctgttgagcagattcttcctaccttagttcggctcctgcatcatgatgatccagaagtrttagcagatacctgctgggctatttcctaccttactgatggtccaaatgaacgaattggcatggtggtgaaaacaggagttgtgccccaacttgtgaagcttctaggagcttctgaattgccaattgtgactcctgccctaagagccatagggaatattgtcactggtacagatgaacagactcaggttgtgattgatgcaggagcactcgccgtctttcccagcctgctcaccaaccccaaaactaacattcagaaggaagctacgtggacaatgtcaaacatcacagccggccgccaggaccagatacagcaagttgtgaatcatggattagtcccattccttgtcagtgttctctctaaggcagattttaagacacaaaaggaagctgtgtgggccgtgaccaactataccagtggtggaacagttgaacagattgtgtaccttgttcactgtggcataatagaaccgttgatgaacctcttaactgcaaaagataccaagattattctggttatcctggatgccatttcaaatatctttcaggctgctgagaaactaggtgaaactgagaaacttagtataatgattgaagaatgtggaggcttagacaaaattgaagctctacaaaaccatgaaaatgagtctgtgtataaggcttcgttaagcttaattgagaagtatttctctgtagaggaagaggaagatcaaaacgttgtaccagaaactacctctgaaggctacactttccaagttcaggatggggctcctgggacctttaacttttagatcatgtagctgagacataaatttgttgtgtactacgtttggtattttgtcttattgtttctctactaagaactctttcttaaatgtggtttgttactgtagcactttttacactgaaactatacttgaacagttccaactgtacatacatactgtatgaagcttgtcctctgactaggtttctaatttctatgtggaatttcctatcttgcagcatcctgtaaataaacattcaagtccacccttttcttgacttcaaaaaaaaaaaaaaaaaaaaaggggnggc

SEQ ID NO: 734 - DNA, 1128 bp, Homo sapiens
  misc feature (1105): n equals a,t,g, or c
  misc feature (1117): n equals a,t,g, or c
ctcggagccgttgggtcggttcctgctattccggcgcctccactccgtcccccgcgggtctgctctgtgtgccatggacggcattgtcccagatatagccgttggtacaaagcggggatctgacgagcttttctctacttgtgtcactaacggaccgtttatcatgagcagcaactcggcttctgcagcaaacggaaatgacagcaagaagttcaaaggtgacagccgaagtgcaggcgtcccctctagagtgatccacatccggaagctccccatcgacgtcacggagggggaagtcatctccctggggctgccctttgggaaggtcaccaacctcctgatgctgaaggggaaaaaccaggccttcatcgagatgaacacggaggaggctgccaacaccatggtgaactactacacctcggtgacccctgtgctgcgcggccagcccatctacatccagttctccaaccacaaggagctgaagaccgacagctctcccaaccaggcgcgggcccaggcggccctgcaggcggtgaactcggtccagtcggggaacctggccttggctgcctcggcggcggccgtggacgcagggatggcgatggccgggcagagccccgtgctcaggatcatcgtggagaacctcttctaccctgtgaccctggatgtgctgcaccagattttctccaagttcggcacagtgttgaagatcatcaccttcaccaagaacaaccagttccaggccctgctgcagtatgcggaccccgtgagcgcccagcacgccaagctgtcgctggacgggcagaacatctacaacgcctgctgcacgctgcgcatcgacttttccaagctcaccagcctcaacgtcaagtacaacaatgacaagagccgtgactacacacgcccagacctgccttccggggacagccagccctcgctggaccagaccatggccgcggccttcggtgcacctggtataatctcagcctctccgtatgcaggagctggtttccytcccamctttgccattcctcaagctgcaggctttccgttccgaacgtccacggsgccctggcccctggcgcgcaccgagccgcgctggctnctgatcgctcanggcaccgctgt

SEQ ID NO: 735 - DNA, 772 bp, Homo sapiens
  misc feature (661): n equals a,t,g, or c
  misc feature (693): n equals a,t,g, or c
  misc feature (699): n equals a,t,g, or c
  misc feature (741): n equals a,t,g, or c
ttttttttgtgcagtcgctgggaaggaaggagacgcctaaaccgcggcactgcccggtttgagcgtaccaaacctgcccaccggctttgtagccccgattctctgtgttttgctcccgtctccgacgagagaggcggcgacggtggcgtctgcgacgggagacagcgcgtcggagcgagagagcgctgcgcctgccgccgccccaacagcggaggcgccgccgccatcggtcgtcaccagaccggagccgcagcctcccgagcccggccatccgtgccccgctcccagatctctatccttttgggaccatgcgcggaggaggctttggggaccgggaccgggatcgtgaccgtggaggatttggagcaagaggtggtggtggccttcccccgaagaaatttggtaatcctggggagcgtttgcgtaaaaaaaagtgggatttgagtgagctccccaagtttgagaaaaatttttatgtggaacatccggaagtagcaaggctgacaccatatgaggttgatgagctacgccgaaagaaggagattacagtgagggggggagatgtttgtcctaaacccgtgtttgccttccatcatgctaacttcccacaatatgtaatggatgtgttgatggactcacgcactttacaggataacatcangggtagactttgacttggagaaaaccaagatncttgcngcttggctcctggtggtggccccccatcccagctgtggcatngcacacacaaggacaccttttctaagttatg

SEQ ID NO: 736 - DNA, 1099 bp, Homo sapiens
ggcacgagggaatgtttcctccatttaaagtgagatgttctgggctggataaaaaagccaaatacattttattgatggacattatagctgctgatgactgtcgttataaatttcacaattctcggtggatggtggctggtaakgccgaccccgaaatgccaaagaggatgtacattcacccggacagccccgctactggggaacagtggatgtccaaagtcgtcactttccacaaactgaaactcaccaacaacatttcagacaaacatggatttactttggccttcccaagtgatcacgctacgtggcaggggaattatagttttggtactcagactatattgaactccatgcacaaataccagccccggttccacattgtaagagccaatgacatcttgaaactcccttatagtacatttcggacatacttgttccccgaaactgaattcatcgctgtgactgcataccagaatgataagataacccagttaaaaatagacaacaacccttttgcaaaaggtttccgggacactggaaatggccgaagagaaaaaagaaaacagctcaccctgcagtccatgagggtgtttgatgaaagacacaaaaaggagaatgggacctctgatgagtcctccagtgaacaagcagctttcaactgsttcgcccaggcttcttctccagccgcctccactgtagggacatcgaacctcaaagatttatgtcccagcgagggtgagagcgacgccgaggccgagagcaaagaggagcatggccccgaggcctgcgacgcggccaagatctccaccaccacgtcggaggagccctgccgtgacaagggcagccccgcggtcaaggctcaccttttcgctgctgagcggccccgggacagcgggcggctggacaaagcgtcgcccgactcacgccatagccccgccaccatctcgtccagcactcgcggcctgggcgcggaggagcgcaggagcccggttcgcgagggcacagcgccggccaaggtggaagaggcgcgcgcgctcccgggcaaggaggccttcgcgccgctcacggtgcagacggacgcggccgcaagcttattccc

SEQ ID NO: 737 - DNA, 3219 bp, Homo sapiens
  misc feature (3212): n equals a,t,g, or c
  misc feature (3215): n equals a,t,g, or c
catatggttttgcgtccattcctccttcgtcgaattaaggctgatgttgaaaagagtttgcctccaaagaaggaagtaaaaatctatgtgggcctcagcaaaatgcaaagggaatggtatactcggatattaatgaaggatatagatatactcaactcagcaggcaagatggacaaaatgaggttattgaacatcctaatgcagttgagwraatgttgtaatcatccatatctctttgatggagcagaacctggtccaccttatacaacagatatgcatctagtaaccaacagtggcaaaatggtggttttagacaagctgctccctaagttaaaagaacaaggttcacgagtactaatcttcagtcaaatgacaagggtattggacattttggaagattattgcatgtggagaaattatgagtactgcaggttggatggtcagacaccccatgatgagagacaagactccatcaatgcatacaatgaaccaaacagcacaaagtttgttttcatgttaagcacgcgtgctggtggtcttggcatcaatcttgcgactgctgatgtagtaattttgtatgattctgattggaatccccaagtagatcttcaggctatggaccgagcacatagaattgggcagactaagacagtcagagtgttccgctttataactgataacactgtagaagaaagaatagtagaacgtgctgagatgaaactcagactggattcaatagtcattcaacaagggaggcttgtggatcagaatctgaacaaaattgggaaagatgaaatgcttcaaatgattagacatggagcaacacatgtgtttgcttcaaaggaaagtgagatcactgatgaagatatcgatggtattttggaaagaggtgcaaagaagactgcagagatgaatgaaaagctctccaagatgggcgaaagttcacttagaaactttacaatggatacagagtcaagtgtttataacttcgaaggagaagactatagagaaaaacaaaagattgcattcacagagtggattgaaccacctaaacgagaaagaaaagccaactatgccgttgatgcatatttcagggaagctcttcgtgttagtgaacctaaagcacccaaggctcctcgacctccaaaacaacccaatgttcaggatttccagttctttcctccacgtttatttgaattactggaaaaagaaattctgttttacagaaaaactattgggtacaaggtacctcgaaatcctgagctgcctaacgcagcacaggcacaaaaagaagaacagcttaaaattgatgaagctgaatcccttaatgatgaagagttagaggaaaaagagaagcttctaacacagggatttaccaattggaataagagagattttaaccagtttatcaaagctaatgagaagtggggtcgtgatgatattgaaaatatagcaagagaagtagaaggcaaaactccagaagaagtcattgaatattcagctgtgttttgggaaaggtgcaacgagctccaggacatagagaagattatggctcagattgaaaggggagaggcgagaattcaaagaagaataagcatcaagaaagcacttgacacaaagattggacggtacaaagcaccttttcatcagctgagaatatcatatggtactaacaaaggaaaaaactatactgaagaagaagatcgttttctgatttgtatgcttcacaaacttggatttgacaaagaaaatgtttatgatgaattgcgacagtgtattcgcaactctcctcagttcagatttgactggtttcttaagtccagaactgcaatggagctccagaggagatgtaataccttaattactttgattgaaagagaaaacatggaactagaagaaaaggagaaggcagagaaaaagaaacgaggaccaaagccttcaacacagaaacgtaaaatggatggcgcacctgatggtcgaggaagaaaaaagaagctgaaactatgaatatgtttttgtttcataatcactaactttaaaccagtagttctttaatttacgggtcttcataagatgtactgtacaatgctcaattgttatgtcatttaaagacatcaggttcatctgtttactgagctagaaacatagtatgtagtttcacttttttaaatgcaacagctgtgctgaaatttttttatcattaacacttgaagtaataaaataggcttcatttattactaagtgtttcatttgatttatttttctattgtagttccatttgtgaagattgtgactttttgtttattagctataatttctacacttgtaaggcttamaaacaagttaaaaagaaaattgcaaataacatttgtccctttcagtcttcacctagttgtgtaattattttaattcactttgcctttgcagaaatttgggtattttctttgtagtgctattgagtctcatctggaaagattatataaattgcattctccttgcttatgtgggtagaatgggaraagaaggcaagacaaagtatacttaaattctatgcatatttctgttatgctttctgttttttttagttgattctgaaatgaatatgccctattcttttgaaagaatggccttttagttgtatagccaaagacatttagtattttccggttccttaaggtattactgtaccattttgtaaaaggaatattattattattatttttaattatttggtaaatattttgtcatatgaccttctgaagcagccacaacttagataatgtcagaactaaggtgatttttttttttttaattttgaaagcccagccaaaatgaggtgtgaatttgtcatactgttacattgaaattggtaacaaaatatatcccctcccatttggacttttagggtaaatgaaaattttattgtattttaaagtagtttctaagtgttagcaagactgactataattccagtttctgttttctatggacagacctgataaactggagaccctaaagcaggaatacccaaattatagtgtcaggattttagctgtaccagaggcctttatgtgctacacataatttgtataaaattttatatgtgcagattgggtacataaacagttctccatttttctaagggaatgcaataaatgtagcatcgtgaataaatataacttttataatccgtaaaaaaaaaaaaaaagtgngangggg

SEQ ID NO: 738 - DNA, 849 bp, Homo sapiens
ggggacggaagcggcccctgccmraraagggctggagccgggccggggcgatgtggagcgcgggccgcggcggggctgcctggccggtgctgttggggctgctgctggcgctgttagtgccgggcggtggtgccgccaagaccggtgcggagctcgtgacctgcgggtcggtgctgaagctgctcaatacgcaccaccgcgtgcggctgcactcgcacgacatcaaatacggatccggcagcggccagcaatcggtgaccggcgtagaggcgtcggacgacgccaatagctactggcggatccgcggcggctcggagggcgggtgcccgcgcgggtccccggtgcgctgcgggcaggcggtgaggctcacgcatgtgcttacgggcaagaacctgcacacgcaccacttcccgtcgccgctgtccaacaaccaggaggtgagtgcctttggggaagacggcgagggcgacgacctggacctatggacagtgcgctgctctggacagcactgggagcgtgaggctgctgtgcgcttccagcatgtgggcacctctgtgttcctgtcagtcacgggtgagcagtatggaagccccatccgtgggcagcatgaggtccacggcatgcccagtgccaacacgcacaatacgtggaaggccatggaaggcatcttcatcaagcctagtgtggagccctctgcaggtcacgatgaactctgagtgtgtggatggatgggtggatggagggtggcaggtggggcgtctgcagggccactcttggcagagactttgggtttgtaggggtcctcaagtgcctttgtgattaaagaatgttggtctatgaaaaaaagtc

SEQ ID NO: 739 - DNA, 2069 bp, Homo sapiens
  misc feature (2046): n equals a,t,g, or c
gcgccgactgagcctctaaagcgacttcagctctgccccaccaacaccaccgctccgggggaggggcttaatgctggggaagggatgtcttaaaagaggagaagctttaaattagacgatcggagaaggctgagggaattgctatgaargggcgggagctgaagtgtagaggactcctttagacagcagaaagggaaagccgttgagaagttcccttcaaactccacctgcctcctctccaattcaaactccactcccttctccaaaagttaaaaggaaagccaagtttgccacgctcccctgttcctactcaataaatacttcttctactccgccaccgggaaaacagaaaaaaaaaactaatttccttcccaatattaggacttagaaaagctctaggtcccgcaayttgaattttagcctaggggaatcaaaatagtaggagcattactcttgtttcctttttcaaaatcccacacctcatccttcctgcgacgccatgtctaccaacatttgtagtttcaaggacaggtgcgtgtccatcctgtgttgcaaattctgtaaacaagtgctcagctctaggggaatgaaggctgttttgctggctgatactgaaatagaccttttctctacagacatccctcctaccaacgcagtggacttcactggaagatgctatttcaccaaaatctgcaaatgtaaactgaaggacatcgcatgtttaaaatgtgggaacattgtagkttatcatgtgattgttccatgtagttcctgtcttctttcctgcaacaacrgacacttctggatgtttcacagccaggcagtttatgatattaacagactagactccacaggtgtaaacgtcctacttyggggcaacttgccagagatagaagagagtacagatgaagatgtgttaaatatctcagcagaggagtgtattagataaatggaattatgatatatatgatatacaaacttttttctatttaaaaatatattaatggatcaactttaaaattgttagttgccagtgatcttttttggaaaacaaaaatggggcatttgttgatttatttattttctgtctctaattagttacctcagtttgattgaagccagtggagttgtgcttttcctctacttctacttcctctcccccacctttttctgcccagtgtaggtgtattcttaaattcagacgggaagattctttcacatatcactcagttacctcccaatctgggggagtttttcttacaacttgataccagataccattaattttacattcctgaataaaggcctagtacccacgcatatttcaaccatgcatatatcaagttcaacygagttttaataggggattaaaaaaacaagctgttaggtttccatgggcactggttctcataggttctattggtgataactgctttaacatggagcaagagtttgtgaatcaggaaatagaataaattaaaatttaaaatatatagaggaatcctcttgattgctcagcatgatgttagataaatgagtttgtcagaaaatatcagtatacgctgtttaccaatgttatttatttacattcttctaaagccattatggatattgtattatgagagctaaacctaaataagttatcctgttccctaggaccttctctgtaaatagtgaattttagacgagtagtctgtcctaaatcttaaatagaaaaaaaaactaaagcgatttgcttaagccattgtacattataaagagctgttttgttttgctttgctttgctttgttttgtttttttaaagctgcattcagagccacaaaggaataggaaagtagggtagtgttggattctggttttatgtaactctaaaataaatgtatctctttaatatctcagttgtagggattttgtcaataccaaagcagactgagttgtggttttgtaaataaagttttttctaaaaatgaccattcttcctttaattttttgttatgcccacatattgtatgtaaaaatataaataaatagtacttaaagtatanaaaaaaaaaaaaaaaaaaaggtt

SEQ ID NO: 740 - DNA, 1567 bp, Homo sapiens
  misc feature (1532): n equals a,t,g, or c
  misc feature (1548): n equals a,t,g, or c
aaaaccgagaggaagcaggaagggcggagtctcctatttgagtttgtggcgcgcgaggccctgcagtccgggttggcgcttgggtactggctgggtccgatgctgggtacgctgcgcgccatggagggcgaggacgtggaagacgaccagctgctgcagaagctcagggccagtcgccgccgcttccagaggcgcatgcagcggctgatagagaagtacaaccagcccttcgaggacaccccggtggtgcaaatggccacgctgacctacgagacgccacagggattgagaatttggggtggaagactaataaaggaaagaaacaaaggagagatccaggactcctccatgaagcccgcggacaggacagatggctccgtgcaagctgcagcctggggtcctgagcttccctcgcaccgcacagtcctgggagccgattcaaaaagcggtgaggtcgatgccacgtcagaccaggaagagtcagttgcttgggccttagcacctgcagtgcctcaaagccctttgaaaaatgaattaagaaggaaatacttgacccaagtggatatactgctacaaggtgcagagtattttgagtgtgcaggtaacagagctggaagggatgtacgtgtgactccgctgccttcactggcctcacctgccgtgcctgcccccggatactgcagtcgtatctccggaaagagtcctggtgacccagcgaaaccagcttcatctcccagagaatgggatcctttgcatccttcctccacagacatggccttagtacctagaaatgacagcctctccctacaagagaccagtagcagcagcttcttaagcagccagccctttgaagatgatgacatttgcaatgtgaccatcagtgacctgtacgcagggatgctgcactccatgagccggctgttgagcacaaagccatcaagcatcatctccaccaaaacgttsatcatgcaaaactggaactccaggaggaggcmcrgatataagagcrggatgaacaaaacatattgcaaaggagccagacgttctcagaggagctccaaggagaacttcataccctgctctgagcctgtgaaagggacaggggcattaagagattgcaagaacgtattagatgtttcttgccgtaagacaggtttaaaattggaaaaagcttttcttgaagtcaacagaccccaaatccataagttagatccaagttggaaggagcgcaaagtgacaccctcgaagtattcttccttgatttacttcgactccagtgcaacatataatcttgatgaggaaaatagatttaggacattaaaatggttaatttctcctgtaaaaatagtttccagaccaacaatacgacagggccatggagagaaccgtcagagggagattgaaatccgatttgatcagcttcatcgggaatattgcctgagtcccaggaaccagcctcgccggatgtgcctcccggactcctgggccatgaacatgtacagagggggtcctgcgaagtcctggtggccttnaggcttaaaaacccgnaagctgagttaactttcag

SEQ ID NO: 741 - DNA, 2829 bp, Homo sapiens
  misc feature (74): n equals a,t,g, or c
  misc feature (1523): n equals a,t,g, or c
  misc feature (1728): n equals a,t,g, or c
gacgctgggggcagaccacatgtcagcagtgggtgtcgcttagtaatatattgtgggtcattgttattttcttntttttgtttacttgtatttcctaaatttttctacaatgaacttgtattaataagaaaaaaccataaaatttactgtttttaaaaagctgctctaagtaatcagacagtcaaaagagcaggaatcagctctccaggaggctctttggtctggggccgaggggatgagggtgggtcctgaagacgtctgagtcccttgttacaggagggtgttcattgtgtcctcctcacagctgggagaacagctgaagcagctggtgcctgcaagcggcctcacagtcatggatctggaagctgagggcacgtgtttgcggttcagccctttgatgaccgcagcagttttaggaactcggggagaggatgtggatcagctcgtagcctgcatagaaagcaaactgccagtgctgtgctgtacgctccagttgcgtgaagagttcaagcaggaagtggaagcaacagcaggtctcctatatgttgatgaccctaactggtctggaataggggttgtcaggtatgaacatgctaatgatgataagagcagtttgaaatcagatcccgaaggggaaaacatccatgctggactcctgaagaagttaaatgaactggaatctgacctaacctttaaaataggccctgagtataagagcatgaagagctgcctttatgtcggcatggcgagcgacaacgtcgatgctgctgagctcgtggagaccattgcggccacagcccgggagatagaggagaactcgaggcttctggaaaacatgacagaagtggttcggaaaggcattcaggaagctcaagtggagctgcagaaggcaagtgaagaacggcttctggaagagggggtgttgcggcagatccctgtagtgggctccgtgctgaattggttttctccggtccaggctttacagaagggaagaacttttaacttgacagcaggctctctggagtccacagaacccatatatgtctacaaagcacaaggtgcaggagtcacgctgcctccaacgccctcgggcagtcgcaccaagcagaggcttccaggccagaagccttttaaaaggtccctgcgaggttcagatgctttgagtgagaccagctcagtcagtcacattgaagacttagaaaaggtggagcgcctatccagtgggccggagcagatcaccctcgaggccagcagcactgagggacacccaggggctcccagccctcagcacaccgaccagaccgaggccttccagaaaggggtcccacacccagaagatgaccactcacaggtagaaggaccggagagcttaagatgagactcattgtgtggtttgagactgtactgagtattgtttcagggaagatgaagttctattggaaatgtgaactgtgccacatactaatataaattactgttgtttgtgcttcactgggattttggcacaaatatgtgcctgaaangtaggctttctaggaggggagtcagcttgtctaacttcatgtacatgtagaaccacatgtttgctgtcctactacgacttttccctaagttaccataaacacattttattcacaaaaaacacttcgaatttcaagtgtctaccagtagcacccttgctctttctaaacataagcctaagtatatgaggttgcccgtggcaacttntttggtaaaacagcttttcattagcactctccaggttctctgcaacacttcacagaggcgagactggctgtatcctttgctgtcggtctttagtacgatcaagttgcaatatacagtgggactgctagacttgaaggagagcagtgattgtgggattgtaaataagagcatcagaagccctccccagctactgctcttcgtggagacttagtaaggactgtgtctacttgagctgtggcaaggctgctgtctgggactgtcctctgccacaaggccatttctcccattatataccgtttgtaaagagaaactgtaaagtctcctcctgaccatatatttttaaatactggcaaagcttttaaaattggcacacaagtacagactgtgctcatttctgtttagtatctgaaaacctgatagatgctacccttaagagcttgctcttccgtgtgctacgtagcacccacctggttaaaatctgaaaacaagtacccctttgacctgtctcccactgaagcttctactgccctggcagctcgcctgggcccaactcagaaacaggagccagcagagcactctctcacgctgatccagccgggcaccctgcttaagtcagtagaagctcgctggcactgcccgttcctacttttccgaagtactgcgtcactttgtcgtaagtaatggcccctgtgccttcttaatccagcagtcaagcttttgggagacctgaaaatgggaaaattcacactgggtttctggactgtagtattggaagccttagttatagtatattaagcctataattatactctgatttgatgggatttttgacatttacacttgtcaaaatgcagggggttttttttggtgcagatgattaaacagtcttccctatttggtgcaatgaagtatagcagataaaatgggggaggggtaaattatcaccttcaagaaaattacatgtttttatatatatttggaattgttaaattggttttgctgaaacatttcacccttgagatattatttgaatgttggtttcaataaaggttcttgaaattgttaaaaaaaaaaaaaaaaaaaaaaaaaaaaaaaaaaaaa

SEQ ID NO: 742 - DNA, 926 bp, Homo sapiens
  misc feature (30): n equals a,t,g, or c
  misc feature (460): n equals a,t,g, or c
ggagacctcctgacctttggccctgaagcnaccgaggaaccagcccctcggagttctacttcatgttccaacaagtacgagtcaagcctcaggactttgctgccattaccatcccacggtctaggggagaagcccgggttggggctggtttccggcctatgctgccctcccagggggctccacagcggcctctcagcaccttctcccctgcccccaaggccacactgatcckaaactccataggcagcctcagcaagctccggccccagcccctcaccttctcccctagttggggtggaccaaagagcctgcctgttcccgccccacctggggaaatggggaccacgccttctgctccaccmcaacgcaatcggaggaaatctgttcaccgagtgttggcggaactggatgatgagagtgagcctcctgagaacccgccaccggtccttatggagcccangaagaaactccgtgtagacaaagccccactgactcccactggaaatcgacgtggccgtcctcggaagtacccagtgagcgctcccatggctccccctgcagttgggggcggggagccctgtgcagctccttgttgctgcctgccccaggaagagacagtggcctgggttcagtgtgatggctgtgacgtctggttccatgtggcctgtgkkggctgcagcatccaggctgccagggaggccgacttcykatgcccagggtgccgggctggcattcagacctaaggtccrcygccaaggcaccatcggacacacctgcccatgagtagacacagcagcgagcaaataggtctgataaatamcccccttcccttccctccccaagaggaatgactacagggaagaaggatggattgatgtggactcattcaggccttgagcagaccctggtggccaagacagaagaga

SEQ ID NO: 743 - DNA, 1017 bp, Homo sapiens
  misc feature (599): n equals a,t,g, or c
aggggctgcagctgccaaacccaataccctctatttaacccctactctgttttacaagagaaataaaagaagtatcagcagagctcaggtgctaacacctgttgagggctgacctacaaaactctgcctacaaaactctcttagacaggtgaatatgccactagaagttaggttgctggtagacctgggggtccctgcgggagggtgatggtttctttaccaccccacaggagatttcagtggcaaggcatgcctgcagtgggctttgggccatgcatcttccaagtccataggtcttcacctgggtggcagtgagaaaaagtagaaagtaatgagcctcctgtgtctctggaaggttctagggwtagggtagagggaagaagagaacaaacaagcctggcttgtgctgaagtgtggtaggcactaccctgtttgcgtgaagagaaaacaaagcacctgttagtagggaggctttagggggaagccccgtcttgggggcatttctgggcagattgtgaattggaggaatctctttaactgaagtactctggctggaccctgcccttgtgtgaccatgtctcctattgcaccagcatttngaattccatggctcaagagggttctggtaccatttattcacagactgtatcctcgagagagctgctatatatgggagtgtaccagccaactccttttccagtgtctgtaagtcacctcattaaagtataattagctgtctcctctgggagatcctaccccatcagacaagggcagtgagcccaagcagtgccagaggccctcagaaagggattagggtagatgattgcaactgaaacacaatcttctttctttgccagggtattttgggggttttgccccaaaatataccctgggcatagcattactgcagtcttggatgtctaccccaaacttccacaccatccttcgacccacagctgcacctttatttatttattttgctccagcctgggggacagagtgagacttcgtctcggg

SEQ ID NO: 744 - DNA, 361 bp, Homo sapiens
ggtggccgctggagtttgtgtggccgccgccgcgggaacgcgagcccggtaatttttcaacggagaaaggcgaggctttcgggctctgcagagtgagagttagcaagtgtccggctccagccggcatggaggatccacagagtaaagagcctgccggcgaggccgtggctctcgcgctgctggagtcgccgcggccggagggcggggaggagccgccgcgtcccagtcccgaggaaactcaacagtgtaaatttgatggccaggagacaaaaggatccaagttcattacctccagtgcgagtgacttcagtgacccggtttacaaagagattgccattacgaatggctgtattaatagaat

SEQ ID NO: 745 - DNA, 1936 bp, Homo sapiens
gggtttttaccccttctaaaataagttttattccatctgcaaattgctgcaatattatagtaatcagaaactacataaggaatgttatataggcttgtcagttcccatttttcttgacaacaataaataccacttttaaaaatgacacatatttaaacacttagaaaataaagttaacacttactgaagtgctagtactaaactgtgctagtactaaaagaaaacaggttggaacatacatatagcctagcatttataacagaattgttgaacgysygyaaatgatttttttttttttttgcaaaggaaaaaattgatactggaaaagattgttgtgcatagttattagtcatttgtaaccttgcttaagtatttcttagtccaacatagatattttctttctcctgaccatgtattttaaaatatagtctatttcttgactttgaacttaaagctttaatcataawttctcatgtatacatcgttcttctgatggtaagctggatttgaaggtagtggtttcagtgtttcttaagttggtagctgagggtatcaggcatcagttcatgcaataatacaagaaaaaaaatcctttgcttgccaagaggtagagtgatgtgcatttatctgttttctgttctgtaagtctagaccttcaaaccatttgtaaactaacccctgggaaatttgaaattacctgataacttaagactctgtgatctctggaatcaccatatgtttcttttttgtgtagatattaataacattactctttgactatagtgtgcactctgaaatgtactcagtgaaaatttgttttgagtttcattaatgctatttcaccagttagacataattacttctaccgatgtgaatgatacggatgccggcagagcttccagatctttcagactcaactgctaggtcaattagtttgtcataataaaacttggcagattctacaagtctattatgacaaaccaggaactaattctataatggaaaactatccattctgaataataggtatgtaattatttgctgctgctgctgtgctctgtaaattctgaatatgacatttaaactctgtgcctactaaaggtatcttctggagtttttgggaggagagaaactggaaaattaaattgtatttttgccagaagactcttacttgcatgtgtctcagggtcttcagtttttctataagtttccatatccaaagttcagaattcatgtgaaatacttctttggggcaaaagtccttcattcctggtatttattggattggaaatctgtagcaagatgctgtttaaaattaccatattgtttttttatcttatacttagctctctggctattgaacttccttttcttgtttgaagttagcttcaaatttgctcctatgctaaattacctgtaaatattctggataggaactacttgaaatagtaatttgttaaaagatatgacaaaatgaaaatgcttaaactacagaaatttaaaaatgccataacaatcttgcgagactaactttaaaatatactttaaatgattattatgattttggtggtaacgatcccccacacacaaccactatgaagaaataatgccgcatttttcccccattgtaccaaaaagataaaaaaatggtaaacactgatcaaggtattttgtattgtcaaggcatgcatattctaaagaattaaatgctaacttaacagcactggctttctggctggtcaactatatgaaaccttgttcattcctccgagtactgtaatgttcacacttgtacaatcttccctgtcatgactttaagttctacttttcattaaccatggcctgatattagttcttagagcttcttgtggcaaaaataaaatgatttaattctgaaaaaaaaaaaaaaaaaaaaaaaaactcgagactagttctc

SEQ ID NO: 746 - DNA, 1619 bp, Homo sapiens
  misc feature (1565): n equals a,t,g, or c
  misc feature (1567): n equals a,t,g, or c
  misc feature (1568): n equals a,t,g, or c
ggcggaggagagccgtgcgcacggcgtatgtggggccgtgtgcagacccgcgtgtggcgcaggcaaggaccctcaaaataaacagcctctaccttgcgagccgtcttccccaggcctgcgtccgagtctccgccgctgcgggcccgctccgacgcggaagatctgactgcagccatgagcagcaatgagtgcttcaagtgtggacgatctggccactgggcccgggaatgtcctactggtggaggccgtggtcgtggaatgagaagccgtggcagaggtttccagtttgtttcctcgtctcttccagatatttgttatcgctgtggtgagtctggtcatcttgccaaggattgtgatcttcaggaggatggcctgctataactgcggtagaggtggccacattgccaaggactgcaaggagcccaagagagagcgagagcaatgctgctacaactgtggcaaaccaggccatctggctcgtgactgcgaccatgcagatgagcagaaatgctattcttgtggagaattcggacacattcaaaaagactgcaccaaagtgaagtgctataggtgtggtgaaactggtcatgtagccatcaactgcagcaagacaagtgaagtcaactgttaccgctgtggcgagtcagggcaccttgcacgggaatgcacaattgaggctacagcctaattattttcctttgtcgcccctcctttttctgattgatggttgtattattttctctgaatcctcttcactggccaaaggttggcagatagaggcaactcccaggccagtgagctttacttgccgtgtaaaaggaggaaaggggtggaaaaaaaccgactttctgcatttaactacaaaaaaagtttatgtttagtttggtagaggtgttatgtataatgctttgttaaagaaccccctttccgtgccactggtgaatagggattgatgaatgggaagagttgagtcagaccagtaagcccgtcctgggttccttgaacatgttcccatgtaggaggtaaaaccaattctggaagtgtctatgaacttccataaataactttaattttagtataatgatggtcttggattgtctgacctcagtagctattaaataacatcaagtaacatctgtatcaggccctacatagaacatacagttgagtgggagtaaacaaaaagataaacatgcgtgttaatggctgttcgagagaaatcggaataaaagcctaaacaggaacaacttcatcacagtgttgatgttggacacatagatggtgatggcaaaggtttagaacacattattttcaaagactaaatctaaaacccagagtaaacatcaatgctcagagttagcataatttggagctattcaggaattgcagagaaatgcattttcacagaaatcaagatgttatttttgtatactatatcacttagacaactgtgtttcatttgctgtaatcagtttttaaaagtcagatggaaagagcaactgaagtcctagaaaatagaaatgtaattttaaactattccaataaagctggaggaggaagggganannaaaaaaaaaaaaaaaaaaaaaaaaaaaaaaaaaaaaaaaaaaaaaaaaagg

SEQ ID NO: 747 - DNA, 492 bp, Homo sapiens
  misc feature (54): n equals a,t,g, or c
  misc feature (476): n equals a,t,g, or c
  misc feature (491): n equals a,t,g, or c
aattcggcacsgcgcaggaggacggagccctaaccgcaacccgcgccgcgccgngccgatttgatttgtatccactgtcaccagcactgctcacttaggactttctggatccggacccaggcagcgcacactggactcttgaggaagaaggagactctaattttggattccttggtggaggaaaataaaacactctggtcttgccgccaacgatgcaagtgtgactgctggcgtcttcatgagctccagaggtcacagcacgctaccaaggactctcatggcccctcggatgatttccgagggagacataggaggcattgctcaaatcacctcctctctattcctgggcagaggcagtgtggcctccaatcggcacctyctccaggctcgtgggcatcacctgcattgttaatgstaccattgagatccctaatttcaactggccccaatttgagtatgttaaagtgccttggtgnacatgccccattggnt

SEQ ID NO: 748 - DNA, 603 bp, Homo sapiens
  misc feature (598): n equals a,t,g, or c
cccgccgccacccggcagtagttgcggaggtcagccccgcctacttcctctttccctcggagcgggcggcggcgttggcggcttgtgcagcaatggccaagatcaaggctcgagatcttcgcgggaagaagaaggaggagctgctgaaacagctggacgacctgaaggtggagctgtcccagctgcgcgtcgccaaagtgacaggcggtgcggcctccaagctctctaagatccgagtcgtccggaaatccattgcccgtgttctcacagttattaaccagactcagaaagaaaacctcaggaaattctacaagggcaagaagtacaagcccctggacctgcggcctaagaagacacgtgccatgcgccgccggctcaacaagcacgaggagaacctgaagaccaagaagcagcagcggaaggagcggctgtacccgctgcggaagtacgcggtcaaggcctgaggggcgcattgtcaataaagcacagctggctgagaaaaaaaaaaaaaaaagggggggccctttaagagggatcccttcgaaggggcccaaagcttamgcgtkgcattscgaacgtcaataggttctcttccctnattag

SEQ ID NO: 749 - DNA, 2045 bp, Homo sapiens
ggcacgaggaggacgtggggcttccgtgaatgcgcagtgggtgcgtcggccacgaccttttggccaggttagggagggggcgacgctgagatgggggcggcggcggcggaagcggatcgcactctctttgtgggcaaccttgaaacgaaagtgaccgaggagctccttttcgagcttttccaccaggctgggccagtaataaaggtgaaaattccaaaagataaggatggtaaaccaaagcagtttgcgtttgtgaatttcaaacatgaagtgtctgttccttatgcaatgaatctacttaatggaatcaaactttatggaaggcctatcaaaattcaatttagatcaggaagtagtcatgccccacaagatgtcagtttgtcatatccccaacatcatgttggaaattcaagccctacctccacatctcctagcgcaggtacgaaaggactatggataacatgacttcatcagcacagataattcagagatctttctcttctccagaaaattttcagagacaagcagtgatgaacagtgctttgagacaaatgtcatatggtggaaaatttggttcttcacctctggatcaatcaggattttcaccatcagttcaatcacacagtcatagtttcaatcagtcttcaagctcccagtggcgccaaggtacaccatcatcacagcgtaaagtcagaatgaattcttatccctacctagcagatagacattatagccgggaacagcgttacactgatcatgggtctgaccatcattacagaggaaagagagatgatttcttctatgaagacaggaatcatgatgactggagccatgactatgataacagaagagacagtagtagagatggaaaatggcgctcatctcgacactaacacatgttaaaaggacattgtttttatagggtcattttaggccctttgactaagttgatatggaaatattttgttgaaaaactgtacagagcagctttacaagttgtcacatttctttataaatttttttaaagctacagtttaatacaaaatgaattgcggttttattacattaataacctttcacctcagggttttatgaagaggaaagggttttatgcmaaagaaagtgctacaattcctaatcattttagacactttaggagggggtgaagttgtatgataaagcagatattttaattatttgttatctttttgtattgcaagaaatttcttgctagtgaatcaagaaaacmtccaggttgacagtctaaaatggctmctggtattttagttaattcaaaaatgaaacttttcagtgattcactttactaacattctatttgrgaagscwtattggtaaagtttggggataaaggcattgcttaacttcttatataatttaggtataaattctgtgacatgctcttgagctttaccctagttgaacatacatgtgtagatttacacatactgtttcattctaaaatttagaaattgttcattaaatcccatttgaggtataagtcactcaggaagttaaaatatctctacacgtatatttttacattaaaaatacagtgttagcataaatccccttttcaggaagaacaaaaatgtcagtgcatagttagataaaatggtaaaatgttttactgaaagcatacttttttggaaaatagattcatgaagcctttaagtgctgcttctgtcagtcaaacgttaaaaactttaacattttcaaagtgcccagactgtgtacaaagacacatgtaatggagattgtacaggttgtttttttgtttgaacctttgaaagagtttaatcttaacgttttctaattttaaaattttaaaatcttgtttaacaaaagcttgtattaagatactgttttcatttcattacagaattgtttataaaagttcatttgttgaaaaataaggatcctttttaataccacagcatttgtactgttcctttttaatatactgaaaatataaaaggaagggkgtgtgttaaaaaraaaaaaaaaaaaaaaaaaaaaaaaaaaaa

SEQ ID NO: 750 - DNA, 1144 bp, Homo sapiens
  misc feature (1117): n equals a,t,g, or c
  misc feature (1121): n equals a,t,g, or c
  misc feature (1127): n equals a,t,g, or c
  misc feature (1130): n equals a,t,g, or c
  misc feature (1137): n equals a,t,g, or c
ctcaagtcttccactgcagatacattggaggcttcacccacgttttctttccctttagtttgtttgctgtctggatggccaatgagcctgtctccttttctgtggccaatctgaaggccttcgttggaagtgttgtttacagtaatccttaccaagataacatactgtcctccagaataccaagtattaggtgacactagctcaagctgttgtcttcagagcagttaccaagaagctcggtgcacaggttttctctggttcttacaggaaccacctactctttcagttttctggcccaggagtggggtaaatcctttagttagtgcatttgaacttgatacctgtgcattcagttctgtgaatactgccctttttggcggggtttcctcatctccccagcctgaactgctcaactctaaacccaaattagtgtcagccgaaagkaggtttcaagatagtcctgtcagtatttgtggtgaccttcagattagacagtcttcatttccagccagtggagtcctggctccagagccatctctgagactcgtactactggatgttttaatatcagatcattacccaccatatgcctcccacaggccaagggaaaacagacaccagaacttgggttgagggcactaccagactgacatggccagtacagaggagaactagggaaggaatgatgttttgcaccttattgaaaagaaaattttaagtgcatacataatagttaagagcttttattgtgacaggagaacttttttccatatgcgtgcatactctctgtaattccagtgtaaaatattgtacttgcactagcttttttaaacaaatattaaaaaatggaagaattcatattctattttctaatcgtggtgtgtctatttgtaggatacactcgagtctgtttattgaattttatggtccctttctttgatggtgcttgcaggttttctaggtagaaattatttcattattataataaaacaatgtttgattcaaaatttgaacaaaattgttttaaataaattgtctgtataccagtacaagtttattgtttcagtatactcgtactaataaaataacagtgccaattgcaaaaaaaaaaaaaaanaaangccccncgnggggggnccggaac

SEQ ID NO: 751 - DNA, 1598 bp, Homo sapiens
aattcccgggtccacccacgacgtccggttacggccgaaaagatggcggtcttggcacctctaattgctctcgtgtattcggtgccgcgactttcacgatggctcgcccaaccttactaccttctgtcggccctgctctctgctgccttcctactcgtgaggaaactgccgccgctctgccacggtctgcccacccaacgcgaagacggtaacccgtgtgactttgactggagagaagtggagatcctgatgtttctcagtgccattgtgatgatgaagaaccgcagatccatgttcctgatgacgtgcaaaccccccctatatatgggccctgagtatatcaagtacttcaatgataaaaccattgatgaggaactagaacgggacaagagggtcacttggattgtggagttctttgccaattggtctaatgactgccaatcatttgcccctatctatgctgacctctcccttaaatacaactgtacagggctaaattttgggaaggtggatgttggacgctatactgatgttagtacgcggtacaaagtgagcacatcacccctcaccaagcaactccctaccctgatcctgttccaaggtggcaaggaggcaatgcggcggccacagattgacaagaaaggacgggctgtctcatggaccttctctgaggagaatgtgatccgagaatttaacttaaatgagctataccagcgggccaagaaactatcaaaggctggagacaatatccctgaggagcagcctgtggcttcaacccccaccacagtgtcagatggggaaaacaagaaggataaataagatcctcactttggcagtgcttcctctcctgtcaattccaggctctttccataaccacaagcctgaggctgcagccttttatttatgttttccctttggctgtgactgggtggggcagcatgcagcttctgattttaaagaggcatctagggaattgtcaggcaccctacaggaaggcctgccatgctgtggccaactgtttcactggagcaagaaagagatctcataggacggagggggaaatggtttccctccaagcttgggtyagtgtgttaactgcttatcagctattcagacatctccatggtttctccatgaaactctgtggtttcatcattccttcttagttgacctgcacagcttggttagacctagatttaaccctaaggtaagatgctggggtatagaacgctaagaattttcccccaaggactcttgcttccttaagcccttctggcttcgtttatggtcttcattaaaagtataagcctaactttgtcgctagtcctaaggagaaacctttaaccacaaagtttttatcattgaagacaatattgaacaaccccctattttgtggggattgagaaggggtgaatagaggcttgagactttcctttgtgtggtaggacttggaggagaaatcccctggactttcactaaccctctgacatactccccacacccagttgatggctttccgtaataaaaagattgggatttccttttgaaaaaaaaaaaaaaaaaaaaaaaaaaaaaaaaaaaaaaaaaaaaaaaaaaag

SEQ ID NO: 752 - DNA, 1485 bp, Homo sapiens
  misc feature (243): n equals a,t,g, or c
  misc feature (1382): n equals a,t,g, or c
  misc feature (1429): n equals a,t,g, or c
  misc feature (1436): n equals a,t,g, or c
ctttcccgagcctctctccctggccaggccccaggtctcgcagccagggatggagatggggggagggggaacctagagttctttgtagtgcctccctcagactctaacacactcagcctggccccctcctcctattgcaaccccctcccccgctcctcccggccaggccagctcagtcttcccagcccccattccacgtggaccagccagggcgggggtagggaaagaggacaggaagagcangagccagttctgggaggcggggggaaggaggttggtggcgactccctcgctcgccctcactgccggcggtcccaactccaggcaccatgttccccgcgggcccccccagccacagcctcctccggctccccctgctgcagttgctgctactggtggtgcaggccgtggggagggggctgggccgcgccagcccggccgggggccccctggaagatgtggtcatcgagaggtaccacatccccagggcctgtccccgggaagtgcagatgggggattttgtgcgctaccactacaacggcacttttgaagatggcaagaagtttgattcaagctatgatcgcaacaccttggtggccatcgtggtgggtgtggggcgcctcatcactggcatggaccgaggcctcatgggcatgtgtgtcaacgagcggcgacgcctcattgtgcctccccacctgggctatgggagcatcggcctggcggggctcattccaccggatgccaccctctacttcgatgtggttctgctggatgtgtggaacaaggaagacaccgtgcaggtgagcacattgctgcgcccgccccactgcccccgcatggtccaggacggcgactttgtccgctaccactacaatggcaccctgctggacggcacctccttcgacaccagctacagtaagggcggcacttatgacacctacgtcggctctggttggctgatcaagggcatggaccaggggctgctgggcatgtgtcctggagagagaaggaagattatcatccctccattcctggcctatggcgagaaaggctatggtgagggtgggcaaggacacaaggggaaattccgcagaagagggaaaaaccaggcctccacatacagttgctcaggttgtatactgcacgagggcatccaaccaaggactcaaggtgggatgaaatctacccttggtgctactaagaaggggtgctttggccgggcgtggtggctcacgcttgtaatcccagcactttgggaagccaaggcgggaggatcacgaggtcaggagatcgagaccacggtgaaaccccgtctctactaaaaatacaaaaaaattagcccgggcgtggtgggggcgcctgtagtcccagctactcggaanaggcttargcaggaaaatgacgtgaacccgggaagcggagcttgcantgagccnaaatcggccacttgacttcaacctgggtgacaaacgagacttttcttaa

SEQ ID NO: 753 - DNA, 1756 bp, Homo sapiens
  misc feature (1740): n equals a,t,g, or c
  misc feature (1756): n equals a,t,g, or c
ttccagccgakcactggagctgacttccgcaatcccgatggaataaatctagcacccctgatggtgtgcccacactttgctgccgaaacgaagccagacaacagatttccatcagcaggatgtgggggctcaaggttctgctgctacctgtggtgagctttgctctgtaccctgaggagatactggacacccactgggagctatggaagaagacccacaggaagcaatataacaacaaggtggatgaaatctctcggcgtttaatttgggaaaaaaacctgaagtatatttccatccataaccttgaggcttctcttggtgtccatacatatgaactggctatgaaccacctgggggacatgaccagtgaagaggtggttcagaagatgactggactcaaagtacccctgtctcattcccgcagtaatgacaccctttatatcccagaatgggaaggtagagccccagactctgtcgactatcgaaagaaaggatatgttactcctgtcaaaaatcagggtcagtgtggttcctgttgggcttttagctctgtgggtgccctggagggccaactcaagaagaaaactggcaaactcttaaatctgagtccccagaacctagtggattgtgtgtctgagaatgatggctgtggagggggctacatgaccaatgccttccaatatgtgcagaagaaccggggtattgactctgaagatgcctacccatatgtgggacaggaagagagttgtatgtacaacccaacaggcaaggcagctaaatgcagagggtacagagagatccccgaggggaatgagaaagccctgaagagggcagtggcccgagtgggacctgtctctgtggccattgatgcaagcctgacctccttccagttttacagcaaaggtgtgtattatgatgaaagctgcaatagcgataatctgaaccatgcggttttggcagtgggatatggaatccagaagggaaacaagcactggataattaaaaacagctggggagaaaactggggaaacaaaggatatatcctcatggctcgaaataagaacaacgcctgtggcattgccaacctggccagcttccccaagatgtgactccagccagccaaatccatcctgctcttccatttcttccacgatggtgcagtgtaacgatgcactttggaagggagttggtgtgctatttttgaagcagatgtggtgatactgagattgtctgttcagtttccccatttgtttgtgcttcaaatgatccttcctactttgcttctctccacccatgacctttttcactgtggccatcaggactttccctgacagctgtgtactcttaggctaagagatgtgactacagcctgcccctgactgtgttgtcccagggctgatgctgtacaggtacaggctggagattttcacataggttagattctcattcacgggactagttagctttaagcaccctagaggactagggtaatctgacttctcacttcctaagttcccttctatatcctcaaggtagaaatgtctatgttttctactccaattcataaatctattcataagtctttggtacaagtttacatgataaaaagaaatgtgatttgtcttcccttctttgcacttttgaaataaagtatttatctcctgtctacagtttaataaatagcatctagtacacattcaaaaaaaaaaaaaaaaaaaaaaaaaaaaaaaaaaaaaaaanaaaaaaaaaaaaaaan

SEQ ID NO: 754 - DNA, 1795 bp, Homo sapiens
acccacgcgtccgccggggaccacgcgtctcatccatggcttccgcggactcgcgccggstggcagatggcggcggtgccgggggcacyttccagccctacctagacaccttgcggcaggagctgcagcagacggacccaacgctgttgtcagtagtggtggcggttcttgcggtgctgctgacgctagtyttctggaagttaatccggagcagaaggagcagtcagagagctgttcttcttgttggcctttgtgattccgggaaaacgttgctctttgtcaggttgttaacaggcctttatagagacactcagacgtccattactgacagctgtgctgtatacagagtcaacaataacaggggcaatagtctgaccttgattgaccttcccggccatgagagtttgaggcttcagttcttagagcggtttaagtcttcagccagggctattgtgtttgttgtggatagtgcagcattccagcgagaggtgaaagatgtggctgagtttctgtatcaagtcctcattgacagtatgggtctgaagaatacaccatcattcttaatagcctgcaataagcaagatattgcaatggcaaaatcagcaaagttaattcaacagcagctggagaaagaactcaacaccttacgagttacccgttctgctgcccccagcacactggacagttccagcactgcccctgctcagctggggaagaaaggcaaagagtttgaattctcacagttgcccctcaaagtggagttcctggagtgcagtgccaagggtggaagaggggacgtgggctctgctgacatccaggacttggagaaatggctggctaaaattgcctgagaggcagctctaaagcacaagacctggatgtgtgacacacagttttggaaaaaggtctgtggtagtctggagttgatgaggaaggggtacaagatgtggttagaaacatttctttgttctggaaacaaagtactgttgaaaccagcttggaattttttttttttttttttttaagttcagttctcccttatggctgcctttcaaacaagtaccttttatctgatgcctgtatcttccctttgttaaggtgtaacttgatgtagggtcaaggtttttgtgacaacaggcagactccacacagagaggatatgatgagaatatggccatcacctgaaaagttttcttatcttctgtgcttttggtccctggaaacaaatccgcctatgtatgaagctagttgatttccagttgcactatttccagttgcctctgaagttcacaggcaatacattgtctagtcctttgcgaatttctctgatttgtgggcacagttatgaagtttccccacatgtgaagacaggtacaaaatagcagagccaagcagacagtgggtctattcttcattagctcagtgacttgtccacactcgtcttagcacttacgtttcaaaagcttgtcacaaacccttggagtcattcccagataatagaactggaaatgataaatcccctaatgccaagggtctagtgtgttcttagtggttatactgggaagtgtgtggagatttaggtgctgctctgctgctctggatggctgaaggctcctgggccatcttcatgtgctgcttgaagagctcctattttgtactcctggctagaatgctgtggaacaaatacaaagtgaaaaaagttctctgtagatttctgaagtgcatattcattgatgccaagaaaaaaaaaaagttgcctttttgaaaaaaaaaaaaaaaaaaaaaaaaaaaaaaa

SEQ ID NO: 755 - DNA, 1280 bp, Homo sapiens
ctggagtggacacaagcccctttgcaaagtctctgggtcattccagaggggaggctgacctttttgattctggggacattttttccacgggcactggatctcagtccgtggagagaacaaaacccaaggcaaagatagcagagaatcctgccaacccaccagtgggtggtaaagcaaagagccccatgtttcctgctctaggcgaggccagcagtgatgatgatctctttcagtctgctaaaccaaaaccagcaaagaaaacaaatccctttcctctcctggaagatgaggatgacctctttacagatcagaaagtcaagaagaatgagacaaaatccartagtcagcaggatgtcatattaacaacacaagatatttttgaggatgatatatttgctacggaagcaattaaaccctctcagaaaaccagagagaaggagaaaacattggaatctaatttatttgatgataacattgatatctttgctgacttaactgtaaaaccaaaagaaaagtccaaaaagaaagtggaagccaagtctatatttgatgatgatatggatgacatcttctcctctggtatccaggctaagacaaccaaaccaaaaagccgatctgcacaggccgcacctgaaccaagatttgaacacaaggtgtccaacatctttgatgatcccctgaatgcctttggaggccagtagagcacacagggtatccacakgttaccctgcagctacattgttgagttagtgatgatrttgtatatgctsatggtcttaactggattacaaaaagcaaatactagaacagctagctcatckttyacccaatgtacttrgtatttttctgcactggtttaatcatgcttaatactacaaaacaaaaataaatatttcacagtggttggtttgttttgtttttaaaccacagtttgatttagttagccttgctggggccataatatgcttcagggtgtgtaaaagaagaaatctctttgtggctttcatgggcagggaatcycagagatagcaaatgccacctgaccagaagtctttgttatatggatgggaaccctaacttagggcytgggcaggggaaagagaaagaagrtgagagattatacttcatgagtcttagcaatatgggagcaggttttcactgaattctgagggtgcctctgcatgtcctccaaggcaaagtttggcaaactgtggcccccccactgtcatattttgttaataaaattttattggaacacaammamaaaaaaaaaaaattac

SEQ ID NO: 756 - DNA, 3665 bp, Homo sapiens
  misc feature (3654): n equals a,t,g, or c
gaggaggctgggtgaggcgctgagacggtttggcggtgagtcctgggccaggcgcactgaaaggcccgcaacccgggaaacgtcaaaacaaacagaaggacttgggattccggagcagtcgcccctatcgctgctcctgcagttgcggacgccaccgaccccgccgccggaggactgggcactgaaaggcctctaggcctaggcgcggcccgcggagccagacgtgttgctgccgtgagtaaaacgagcgccctctccgcactcgtttacaaattaaaatggaggaaatttcgttggccaacctggatactaacaagctagaggccatcgctcaggagatttacgtagacctgatagaggattcttgtttgggattctgctttgaggtgcaccgggcagtcaagtgtggctacttctacctggagttcgcagagactggtagcgtgaaggattttggcattcagccagtggaagacaaaggagcgtgccgcctcccgctttgctcccttcccggagaacctgggaatgggcctgatcagcagctccagcgctcacctccggaattccagtagctgcaaaatgagagtctgaaagtggccaggacaataacatagactggtcctgtggcttcgaggagtaagctaagtagaaaaaagtagaaaaatcagacaaaagttttaattcccccttgaagatcctagcatttaaaaacccaaagtggataatttaggaatcctttttttaaagtgtattacctggagcaagctctgaagccctgggcaggaggagctgcacagcctgcgggccatgcagtgcctgttgatctctaaacacaccaggatgtgcgcaagatcctgtagtgcccccagtgcacaggtgagcagttgtgtgcccagcatataaaatttttggttcctcagcctttctgtctgcctgatgtcaagggcttcctggacagtttggacgttacagttcgtcaggccgtgatcagtggcctgcagtgggactgctcctttgatatctgaacctctgttatgggcttctctgagacaagtaaatgtcaggtgcaagatctggatactaacagtttcagtttgggaaatccaagaaaaagaattatcaagtttgatagggaagctctgtagccttgactccagcaagaagaaaaggtcaaaaccacgtgtttcccaaaagtccagactacaatgattcagctgacttgaggacaaggcctagcatttggctgagcagagccctcttccttgccctccaacctggtggcataggcttggcaaatggacaacttggttgtccagacaggttgaggattcggttatgatcccctggggaggtagcagggacctctgcaactatgcatgatttctcaaacttcaagattcatgtctggatgtattatgctgtggatataagtttagtagggcggtcatttcctactctrmgttactggttacctagccagtccatgggtgtgacttggtccttaagtcaggtcactatctgcctcccaccctgggggcaggactgaagtatagaagagcatcatggctgtgcaggaggctgtggtttgaaaactgagcccagagggcactttcagctgccctcaataatgtgaatggattagtgctaggagccaaggagcaggactggattatctcatctgactgtgtgcagaatcctgttgaatgtccctgttttctttggttgggcagtcagagctctgctatggtgaacatccagactgtcaccactttctgtctgccgctcgaaagggatagtcctttccactcggtcccctttggatcttcttgacaacaggagcagtccttttattgttagaagtcagagaaagacctccagaatctcctgactttagggaatggtataggggaagatgggaagtaagagtcacatatcaaaactaccctccactttattccctgagcgagggtttatgaagtataaaggggtgggagccccgaggtgagcgggaacggtgctgctttatttgaaatgttttcttacctcattctgtgccccagtagggggtccagcctcatctgtctggcttggccctgtgttcctcctgtcccctgctccactgcctatctggtgccccaggtgctgcttgccactccagctgtcacattgaacagtttcaattcagctcttaatgctcctgcttccgaagcctgcccaatttcttttttcttggcctctgttttttttttttctttctttttcccttgtttttgtagaagactcagaggagaatctttcttatggctccctctgttgagattggaattggaagagaacttaattttttgtatttaaaatgcagtgtcatgcctataagcatttctcctatataggactgctttgctagtgtgccctcttgctgtgtcttacttcataaggagttgtatcttcccacctccatttcaatactgccggttaggacctaagtagaagagcagtaaaggctgattgacacacagggggatggagttggtccttgtccattctctcacccttgctgtgcatgtatcaatccttatcccagaaggtactatttagactgtatagactgatttagattacatactttagaggattaaggaaaccatagagtttgggccttggaactgttactgccttgtcctagagttgtcctgatcaggcttggggcctagttacagattagtcttaaagaattgcattaacttaaaaaaaatcaaaccttggcaagagctaaaataatttggagatatctttgcccttgacttgtagacgacatctaagaggatgaagaaaggagagtctaagtgagactctggcctacttcctaacaatgtcttggaagtgggatgatggtaaaggagaaaggccacagtccaatccctctgccttcagatagggaactcaaatcctgaaattactgttttctttctggccttttctcctggttagaggaggaagcggaaagtagttttgagtaatactttgttcatattaccccccttttgttttttgtttctggcccctctaccaatagggcagtagcctcctgccctggatgggtataaggtgggcttggtccaacaggtkcccagagggtacatactcctttctggggagagaatgctccctaccatatagttgacagtggttaggaactctccctttccctacctaccttccttttaatagcagaattcctatttttcccttgattatgtgtattgatcaccctgcaatcctattatgtatctgagtgtgtgtgtgtgtgtatgtgtgtgttatgggggaaggggggggttctttaaaatttctgtggtttgtggctttttcttccatacattagttcccaccatcgcatgcccagggaccactgcctggcattatcgcatgctgggatcatcgggggagggtagtgaagctcaccactgtcctttgttttggagatttttatttttgcataagtagtccatcctatacagatagctgattaactgtattcccctttcccctatggctgctggtgtaaataaactgcatctccccattggtaaacagtaataaaattttaaaaaatgaaaaaaaaaaaaaaaaaagaaaaaaaaaagaaaaaanaaaaaaagaaa

SEQ ID NO: 757 - DNA, 1221 bp, Homo sapiens
  misc feature (1071): n equals a,t,g, or c
  misc feature (1081): n equals a,t,g, or c
  misc feature (1201): n equals a,t,g, or c
gccggcgcccgccgcccacgtcgcaggaaaccccggtggggacgcggcccccgcagccacgggcaccgcggccgccgcctctttagccaccgccgccggcagcgaagacgcggagaaaaaagttctcgccaccaaagtccttggcactgtcaaatggttcaacgtcagaaatggatatggatttataaatcgaaatgacaccaaagaagatgtatttgtacatcagactgccatcaagaagaataacccacggaaatatctgcgcagtgtaggagatggagaaactgtagagtttgatgtggttgaaggagagaagggtgcagaagctgccaatgtgactggcccggatggagttcctgtggaagggagtcgttacgctgcagatcggcgccgttacagacgtggctactatggaaggcgccgtggccctccccggaatgctggtgagattggagagatgaaggatggagtcccagagggagcacaacttcagggaccggttcatcgaaatccaacttaccgcccaaggtaccgtagcaggggacctcctcgcccacgacctgccccagcagttggagaggctgaagataaagaaaatcagcaagccaccagtggtccaaaccagccgtctgttcgccgtggataccggcgtccctacaattaccggcgtcgcccgcgtcctcctaacgctccttcacaagatggcaaagaggccaaggcaggtgaagcaccaactgagaaccctgctccaccaaccagcagagcartgctkartaacaccaggytcytmaggcaccttyaccatcggcaggtgacctaaagaattaatgaccattcagaaataaagcaaaaagcaggccacaaccttaaccaacaccaaagaaacatccaagcaataaagtggaagactaaccaagatttggacattggaatgtttactgttattctttaagaaacagctacaaaaagaaaatgtcaacaaatttttccagcaagctgagaacctgggaattctgcacggaagaccagagagtagcctcttccgttttcagcaaccgctaggtttccatntttttttccnggtttttactgttttggtaatatatatattgaaaccaggaatattaatacccatggggagaaccccacccaagaattgaatatatggtaatgcttttttccgtttgtcattggtgctggnctgcgattctgaacccggga

SEQ ID NO: 758 - DNA, 631 bp, Homo sapiens
  misc feature (630): n equals a,t,g, or c
attagcgcgtaacgagagactgcttgctgcggcagagacgccagaggtgcagctccagcagcaatggcagtgacggcgttggcggcgcggacgtggcttggcgtgtggggcgtgaggaccatgcaagcccgaggcttcggctcggatcagtccgagaatgtcgaccggggcgcgggctccatccgggaagccggtggggccttcggaaagagagagcaggctgaagaggaacgatatttccgacattacaggttatgctttgagatctctttggggtgaaggattgaaattaaaccctgagccaccgtgtccttgtagagcacagagtagagaacaactggcagctttgaaaaaacaccatgaagaagaaatcgttcatcataagaaggagattgagcgtctgcagaaagaaattgagcgccataagcagaagatcaaaatgctaaaacatgatgattaagtgcacaccgtgtgccatagaatggcacatgtcattgcccacttctgtgtagacatggttctggtttaactaatatttgtctgtgtgctactaacagattataataaattgtcatcagtgaaaaaaaaaaaaaaaaaaaaaaaaaaaaaaaaaaaaaaaaaaaaaaaaanc

SEQ ID NO: 759 - DNA, 2496 bp, Homo sapiens
ggcaactattgtaacatcccaaaagctccccttgtgccttttccggtcattgtcttttcaggagttgccactatcctaattctaacaccatagcttcgttttgtctgagactacgttccttttaatataactgaactgtttaattcatctgagaattctacctatgatgaaaaatgttgtggtggtagcatttgggttaattctrattatagagtctcttggagagcaatgtccataaactaatcccaaacaacattgtctttttratgttgtagtgaacagcagagaatttcaaaggaccttgctaatatctgtaagacggcagctacagcaggcatcattggctgggtgtatgggggaataccagcttttattcatgctaaacaacaatacattgagcagagccaggcagaaatttatcataaccggtttgatgctgtgcaatctgcacatcgtgctgccacacgaggcttcattcgttatggctggcgctggggttggagaactgcagtgtttgtgactatattcaacacagtgaacactagtctgaatgtataccgaaataaagatgccttaagccattttgtaattgcaggagctgtcacgggaagtctttttaggataaacgtaggcctgcgtggcctggtggctggtggcataattggagccttgctgggcactcctgtaggaggcctgctgatggcatttcagaagtactctggtgagactgttcaggaaagaaaacagaaggatcgaaaggcactccatgagctaaaactggaagagtggaaaggcagactacaagttactgagcacctccctgagaaaattgaaagtagtttacaggaagatgaacctgagaatgatgctaagaaaattgaagcactgctaaaccttcctagaaacccttcagtaatagataaacaagacaaggactgaaagtgctctgaacttgaaactcactggagagctgaagggagctgccatgtccgatgaatgccaacagacaggccactctttggtcagcctgctgacaaatttaagtgctggtacctgtggtggcagtggcttgctcttgtctttttcttttctttttaactaagaatggggctgttgtactctcactttacttatccttaaatttaaatacatacttatgtttgtattaatctatcaatatatgcatacatgaatatatccacccacctagattttaagcagtaaataaaacatttcgcaaaagattaaagttgaattttacagttcgtatattcatgtggtcctttgaaagggtattctagaaatcactggaaagaggagaggaaagaaccaggtaggcaaatggtctgtgaaacccttgggtcctggaagcagtgtgagtgtaaatgtgtagtgtttggtttcatctaaataaacaaagatgatttctttgacacttgaaataaaatacaaattcaacaaaaagtagatcagcattattaaagaaacggttcaactttgtttcttcccttagtattgctgacaaagtatctgctgtagaatacaggaattacttagaatagaaacatagtcatcacaactgttactaaatggaaaagaaaagaattattgagttaagtattcctgtcaatacgggaaacactgctagtaccttatgttggtgttagacctytctgccctacactgagaatatagttttacacaggagcaaggtttgtgaagcagcatagtgaggtagctaaagccatgggctggctctaaaggctttaaatcccagccatgtggcttagctgccatgagatgtgcatttgagaaatgttgtcttcttttgctgttcaactccagattttcagatgataatgtgattatcccagcttaagttgcgtccacttctggtctagtgaattgtggaaggcagttttagagaaaggagtcatgagtaacatgaacagcagttggctatgtctttccagttctctgctgatgtcagaaagacccagaaataccaaggagaaaaagccatcttagggatctaaggaggccctatggaaagttactaccttagacatttgaagatagcttactgcttagtacatacactgtaaacaacgatctcattttaaatgagaactttctcataaatattttacaaatgaggtcaaactagcataaagccatttaaagagattaacagtccaatatgaaccagttaagtctttggactatccctttcctccttgactactgctttgacgtacctaaatcattcatcttacatgtcagaggaaattagttttggatagttctcctttctgctgtwcctcatgggggagtgagagagcagcaatagagaacacaatgaaaaaaatggaatactgggtaaacaccaataatatttccattagtctcctaaagatgtaatgcataggaagtatggcatgaacatctttaggagactaatgatgttcatgccatacttccaatgtaatgcatagc

SEQ ID NO: 760 - DNA, 2048 bp, Homo sapiens
  misc feature (1957): n equals a,t,g, or c
  misc feature (1963): n equals a,t,g, or c
  misc feature (2006): n equals a,t,g, or c
ggcacgagcccggctgacgtgcccgagaagacgcggtccctgggaggcaggcagccgagcgacagtgtctctgacacggttggccctcggtgtgccaggcccgagggagcaccctggacagcctgaggacagccccgaggctgaggcctccaccctggatgtgttcacggagaggctgccgcccagcgggaggatcaccaagacagagtcccttgtcatcccctccaccaggtccgaggggaagcaggctggccgacggggccggagcacatccttgaaggagcggcaggcagcacggccccagaatgagcgggccaacagcctggacaacgagcgctgcccggacgcccggagccagctacagatccccaggaagactgtgtatgaccagctcaaccacatcctcatctccgatgaccagcttcccgaaaacatcatccttgtcaacacctcggactggcaggggcagttcctctccgacgtcctgcagaggcacacgctccccgtggtgtgcacgtgctctcctgcggacgtccaggcggccttcagcaccatcgtctcacggatacagagatactgcaactgcaattcccagcccccgacccccgtgaagatcgccgtggcgggagcgcagcattacctcagtgccatcctgcggctctttgtggagcagctgtcccacaagacacccgactggctcggctacatgcgcttcctggtcatcccactgggctcccaccccgtggccaggtacctaggctccgtggactaccgctacaacaacttcttccasgacctggcctggaragacctgttcaacaagctggaggcccagartgcggtacaggacacgccagacattgtgtcacgcatcacgcagtacatcgcaggggccaactgtgcccaccagctccccatcgcagaggccatgctgacctacaagcagaagagccctgacgaagagtcctcccaaaagttcattccctttgtcggggttgtgaaggttggaattgtggagccatcctcggccacatcaggcgactcggacgacgcggccccctcgggctctggcacgctctcctccaccccgccgtccgcatctcctgcggccaaggaggcctcacccaccccgccctcctccccgtcggtgagcggaggcctgtcctcccccagccagggtgtcggcgccgagctgatggggctgcaggtggactactggacggcagcacagcctgcggacaggaagagggacgccgagaagaaggacctgcctgtcaccaaaaacacgctcaagtgcactttccggtccctccaggtcagcaggctgcccagcagcggcgaggctgcagccacgcccaccatgtccatgaccgtggtcaccaaggagaagaacaagaaggtgatgtttctgcccaagaaagcgaaggacaaggacgtggagtctaagagccagtgcattgagggcatcagccggctcatctgcactgccaggcagcagcagaacatgctgcgggtcctcatcgacggcgtggagtgcagcgacgtcaagttcttccagctggccgcgcagtggtcctcgcacgtgaagcacttccccatctgcatcttcggacactccaaggccaccttctagccccacccaccagggggcccacctcctgccccatgctgtgaggggcccagctgcatttctgttaacatttcagtttactacagagacagacgcttaaaacacaaagagaaacagtcttaagtatgaatgtgctcacaacgtggaaactaacgggggagctcctgccaggagccgaataactgctctgcttattaacccgaacgttcggcccggggctgggaagccagaaggacgatgctgagccatggatcgcgraaggcgtcctctggcctcaggagccacccagaagccttacaggcttgagttcttgsctctgtgtcctgnccyttnctggaagtcaaggactctgctttcttaaggagccccggggaangctgaacttaatgggcacaggcccgaggggccattggggccc

SEQ ID NO: 761 - DNA, 1757 bp, Homo sapiens
  misc feature (1728): n equals a,t,g, or c
gtaaagactttgaaaaagaaatgtacttgttaggaagtagcttaattaccccccattgcagtattattgttatatatatagttaatatgttgtacatcacaataatatataattcagtctctagtttccctagagtcatttttgaaaccactgattgcaaacctccctgacaatttttaaaagtagtaagccacattacatttatctttgtaaaaagatttatggtaactggtttcttacttgacttttataaatagtattttacatcttatttttgcctttatttcataagtaatttaaaaatcactggattgctttattatattcagggcaatatggattatttttataccaaggatttgcatcgtgaattacattaagttatttggcaatttataatttattactactttaaatcaaatgtagcattatcacactgtatttaaattgtcattttttaaaggaatattttcttcttaagatatatagaggattttggagaagagagacaggaggggtaaaaccagcttaaggttcagcgagcagaaagggacctgagaggatgctcactgtaagactgttggacagtggtgtgtattgaggggatgaatcggaacgatagtctcatgcagaaaatagtgagattaagatcatccttattgtttctaaattatttcaatcagatgaaagtgatacgattgaaatgaaatcacatagttcgtgctcagaaattctattttggtatgtttgtattagcctttagaaaaaacactccgtttcagaattgttcacagttttatttcttaggtttttagagttcaggatttcatttattaatttcttcttgcttttttggtggaaataggctttgttgtaaacattaagaatataaaatctcctctatatagaaacaagaattttgttaaaaagagaatttgaatcccttcctatactataaaatgctctatagggagacaaagtgtttcttttttcttttatgtttactgtttatgtggagtgaaatataaggctcttggatgtataacatactcaaaagctgttacactttctctgatctgctgtgatccactgaaaatgtgctggggtttgttctgctgtcactgtttatgctgctggaacttagcactgtcttgatttgaagcatatgattgagagccatttgaagcaatcttcattaatgcagataaaacaagtttacatgtgcagagttagaaaatgacatgttcaattctgtaagtggtgactttttgagcacctttcagtattatgtatttgtaaaaaccattgtttttggatataaagctaataagcactttaaaaaggaaaaggcagcctttactattttttctggttgagtcattgctctttagacctagcatcagcaatagatttcaaagataagtattaagcgctaccctaaagtgtgtaagtttttcattttgtcatattgaaaaatgatttgcatagtactgaatgttgacacacagcttatatgtatttacaagaatatctttaagtgtttttttgacacattaaaataaaggaaataaggaaattgtaagctttatttggatttttaaatacatttttaaaatttcagatgtaatttaacatcacatttgtttttcaggtattgagtttagatgcctactttttatgaggtaccatcagctgggacacagtgtccccgtggcctggtgttttggnaggcaccttttggggaaggctggaggcag

SEQ ID NO: 762 - DNA, 4448 bp, Homo sapiens
  misc feature (3): n equals a,t,g, or c
  misc feature (920): n equals a,t,g, or c
  misc feature (4433): n equals a,t,g, or c
  misc feature (4446): n equals a,t,g, or c
atngcattaatatttaatagtgcttgcttttcctctgggcacacccattttgatcattaaccagagtacctctactcttagcaaactctagtttatgacaaagtatttaaaatatttaaaacaagcttatgcagttcttaaggacgaaggtaaatgagatgtaacttaaaaatagtattgggaaaatgttgatagttaacattagtggatttagactagccawatgacatagtaggctctgaaacatcttktcaagtatatgtattttgtgcatgaatttttgctggaaakctgtctttctctgawawacacaackttcttagaatgaaaagaacaattataawataattatcctatatgtgtttttcattctttttagtgtcatggcttcaaaaatgaaacatttattttaattgccgtaaaggaactgtatttttgttttgttttttaacacagcactttaaatcyagtttgtgttttgtcaacttgaactggaatctcttttgttactttggaggtgataaatagttttcaaatctgctgatttgtatactgtggcacaagtatctttgaactttgatagtgaaaggagaccttcaacaatttttagtctaggcgagaggaatattaggaatgtgacttctaaattttacaatagagcagttattttaaggtcatggttaacatttcttaaggttcmactaaaattcagttaaaatttcagagctacgaggaacttaaatcttagctaaaaattacctgttgtagatagtattaattagattgtttgcagctattaattcatcataaagataaaatgaagaaactctccctttttttaaacaaaaaaaattatttctagattaataggctagtagttatttctgcagaaacaacgtatgggaactgaaagccacctntttttattttagactaatttaaaccacttggaatggattctaggaaacatcttaagcttgtgtgttgcctgtggtggttttttgtttgggggtgttttttggttttggtttgattttctgtattttgttatctggggattttttgtttgtttgttttggtttggttttggttttatatttttggcatgtctatggcagttaaaagtggtatattttgctttagatagggaatcaggttataatcattgttcttcctctaaactgcctcttgggctttacatcaggtcaaggatttttagggtttctcaaaaataggattcttgtcagtgtatgcatgctgagtaagtcacctttctggctctaatttctgggtggccatctgttgtccagctctgctgccaactggactttccgaaagccatgtcaactaattttttatatgctaagacaaatcgaatatgaaaagaggaagaatattctagatattctaagacatttcttaatttggcatctcagaggaggtaggtggaaagtaaaggaagagataattttgggggaaaatttgtggaaacatacaaaacgttttgctttgtatagatgctaaacagagtgggaggcagcatatttgtaacaacaaccattctgaccttttgaaacacaagcttttggagaagtcagggagagacacagtatgaataaaagcaattaacattttctttaatgtatatttttcaaagaggaccackgaatcctgttctctaacccaaggggcagtgtaggtggttttaagcccacagaatattgagatatttctcttgtggttttggtggggtggtgggatgcagaaggttattaaagatcaatttaagcatcagatagactatcccttttatttttttaacttttaggttcargggtacatgtgcaggttgttatataggtaaactcatgtcaagtggttttgttgtacagattattttgtcacccaggtgctaagcctagtacccagtagttattttccctgctcttctccctcctcccaccctccaccctcaagtaggccccagtgtctgttgttcctttctttgtgtccttgagttctcatcatttagctcctacttctaaatgagaacatgtatttggttttctgttctgtgttagtttgctaaggataatggcctccagctcagatggaatatctctatcatatagacctgttgttacagggcaggatcggatgatggacactgaagtcctcagcttgctaagttcagttgctctccctagcctccttttggcttcagagtcttttgattccatctatcctggtattttttgtgtgctgatgtttagttctggattggyttcagctgtgctaataggaagggcgttgtcttttcaagcaatcttaaaaggtggtcaatcaaaaggccagagtctgaatcccttctgtggcttaaataatttgaggatcaagtccagtgtcttgttaatccctgttctactgtgccagacactatcttgaatgcttttatatgttcaggttcaaaatcgctctttcataccaggggatgatagtaacgtgtaacttgcaatagattccttcatcttagtaataagatgatcagtctagttaggacaaaatagagattgaataaattaacttttccaagtttacagagtaaaaatgagcagatctctgcctggttttgtgaaaaagagttagcactggtaaatagaatatttctactcctacaccattctttcagtatatcatcactgaagacaggaagataggcacacagattcttcctcgtagtaattcatagtgcactaggtgaaagagatgaagtatgtattaaaagtacaatgtgatggcatttattattcagataatcccaggattctagaagaaaataaagaagagtgacagttcagttagggtgtgaacttccagaggagcactgcttaagctgaacttgagagcattgtgcaaaagcacagtagtctgttaagaactagaaataacctagcttgtgccacttcgggagtattaagacataagcctagaaaggtaggcaaaggttagatcttagactgtcttgtatttttctcattcctgttgattacctacctcaaaattgaatatgtttttcctcctgcctaacacaaaactacycaagggcagaaatttaaattcttccttggtgtatgtgcaaagaaggttgaatatattcatgcctaccttattttggactaggaatacagtagtatactttccgaagacttgcctgaatagtatataaggtggaggcaactgactagttaggtcagtatttttagaaactcttaatagctcatactcttgataccaaaagcagccctgattgttaaagcacacacctgcacaagaagcagtgatggttgcatttacatttcctgggtgcacaaaaaaaaattctcaaaaagcaaggacttacgctttttgcaaagcctttgagaagttactggatcataggaagcttataacaagaatggaagattcttaaataactcactttctttggtatccagtaacagtagatgttcaaaatatgtagctgattaataccagcattgtgaacgctgtacaaccttgtggttattactaagcaagttactactagcttctgaaaagtagcttcataattaatgttatttatacactgccttccatgacttttactttgccctaagctaatctccaaaatctgaaatgctactccaatatcagaaaaaaagggggaggtggaattatatttcctgtgattttaagagtacagagaatcatgcacatctctgattagttcatatatgtctagtgtgtaataaaagtcaagatgaactctcaagagcctcctacttttgtcttattgtcagatatgtgaaagcagtttttagaggttagaaaatggaaatttccacctttctagtaggatgagaatagagaaatgttctatttttttttttcctacctgcatttgcattcatggatggccaggattcgttttggggtattatttttattgttgttttgcatcctactagctattggatctactatattgctgttatcattgagtatgctttgaagagccttaaatgactccagcagtttgctttgggtgtgaagtctttaattttcccagagatggtggaaatccgattctgagtgaaagtgacagttatcaattactgagttattttcaaccttgtcctcaactgggagccttcagatgcccaaacattctggcaagtaactattattttctgtctaaaatctgtttgtgagcatagtccatcagtcagattattcagccaatttatactattattagtatttactgagaaatatgaaaaggcttttgtcttgctttgaggaatgtggtcttcctgctgttagcttcccaaaactgaataaacacagaccaacctttgaaaaaaaaaaaaaaaaaaaaaaaaaaaaaaaaaccncggggggggcccngg

SEQ ID NO: 763 - DNA, 2890 bp, Homo sapiens
  misc feature (20): n equals a,t,g, or c
ggactgaaggaccgcggttnagggggcgcaggaacgccaaagaaaagacaagcaccgagggccgggaagggtgtaggctgcagtggcagcggatccccggccgccgcttccggcgcttcccggcccagctctcccgcgccgactctgccacatcctccggtgacgtcagccggggccgccatattggaaaggcgccgccgccgcctccgccttggagctcggggtgtttcggggactgcggccacaggcaggaaggcgctcctctcctgccccgccgacgcccggccagcccgcttcgccctgacctgtttcctcatgactgcccccggccctgctgccgacggacgtcgccccggcgtccggatttaacacggaaacccggatcggaggccgcgcggggaggaggagggcgacccggtcggtcctgcgaccctctcggcccggctcggcgcctcggcgggagccatgacctcgctgacccagcgcagctccggcctggtgcagcggcgcaccgaggcctcccgcaacgccgccgacaaggagcgggcggcgggcggcggcgccggcagcagcgaggacgacgcgcagagccgccgcgacgagcaggacgacgacgacaagggcgactccaaggaaacgcggctgaccctgatggaggaagtgctcctgctgggcctcaaggaccgcgagggttacacatcattttggaatgactgtatatcatctggattacgtggctgtatgttaattgaattagcattgagaggaaggttacaactagaggcttgtggaatgagacgtaaaagtctattaacaagaaaggtaatctgtaagtcagatgctccaacaggggatgttcttcttgatgaagctctgaagcatgttaaggaaactcagcctccagaaacggtccagaactggattgaattacttagtggtgagacatggaatccattaaaattgcattatcagttaagaaatgtacgggaacgattagctaaaaacctggtggaaaagggtgtattgacaacagagaaacagaacttcctactttttgacatgacaacacatcccctcaccaataacaacattaagcagcgcctcatcaagaaagtacaggaagccgttcttgacaaatgggtgaatgaccctcaccgcatggacaggcgcttgctggccctcatttacctggctcatgcctcggacgtcctggagaatgcttttgctcctcttctggacgagcagtatgatttggctaccaagagagtgcggcagcttctcgacttagaccctgaagtggaatgtctgaaggccaacaccaatgaggttctgtgggcggtggtggcggcgttcaccaagtaactctgctcggggtgaaccattctcctttctctcaagtaaaccagtagtttttcttctgttgacttctggttttctgtaatttgtactttcccacactataattggcttctgttttacaaaatggtgggtggctttttcttttttgtacgtgtacaggattctgctggtacgagaggccttcctctttctgtttttaaaaaaagttttactgccatattggcattccattccctgttgccatcctcactgttacctgttttgggtttctggtctactttgactttcaaagtacctccagcctcctcatacgcacagcttttggatgacctcagcttgagtttctccatatgtgcatgtacatctagcattctgcctacagttcagacagaagtcacaaaaaggccttcaactcaccaaaggtaaatatctgtatctattaggacattttttacatagacttcagttgagatgtatacttagcaaaattatttttaaattgaaacagcacagtaaatacttaatataaaatgtcccttggattttgcttcccatgtaaatctattgtattattacacttgttataattttaactataaaggtccaattgtttcacagagccagtttgggatgggctgcattccatttatgctgtatatagtttgaattatatataaattaccccttcttctggccacccctgctcccatcttagtattttgcaagatctaatcagttgtacacctggtgcccctcgcttgcttcaatcatggttatttgatggcaaaatcgacctcttgtcgctgaaggagagagaaaagatgtgtgtctgattggtcctgggattttttgagctgtgccatttatggtactctttgcctatgcatcccctttttagattttttttaaattttatcttactgtttttataatttctattgggaagaggcttgtgaccagtaccaatcttgagtttctttttctgtccacaagtaaattaatatctgctctgaaatgtcatttatctactcacacattcttggggaaaaaaatcaaatgtcagtcctagcagatgttgcatgtaaattggtagcaagtaatgattacaacccagaggattaagaattttgtaacagaaagctctatgttttaattttttatatacaattaggataattagcattgtcagactataaacctttgctttttaaagtttatttttactatttctttatcactttattgtatcatcaccattggtttcataatgtaaatactatatgttgaacaaattaaatgtcaaaattttttattaccatagtccatgttaatagtggggctttcaggtgtttagagattttttttgttgttgttaacattcattgcaaaagtactagatggtgtataactctagagttgaattttaagggattccctaatatgtatactatctttttatctgaagtaataaataaacaatgatcttgaaagtgcctgaaaaaaaaaaaaaaaaaaaaaaaaaaaagtcgac

SEQ ID NO: 764 - DNA, 1703 bp, Homo sapiens
  misc feature (368): n equals a,t,g, or c
  misc feature (860): n equals a,t,g, or c
cataggttctgtctttgtctcttcctttcacctcattctggtagcagcataaaggttaggcaatcactgggacccgcatggtgttcctccaaagaatagggtaaaggagagctgggagggagccctctccgttgggtgactcttgtgtgccctttagacaggctggcctgccggttccacagggtacagttaggacttgagtctttctttttctgttttgagttggtgagtgagtgatagggtaacatgggccttcaggatgaccccttggaactgtgccgagttccttaaatctcagctgggatcctggacctgggaggcccctgtgagggccagctctggaaaaacctgggagttgatgccggagntgtggaagaactctgctcgagggcagggtgccctggaacactggtagttctggggctgggagggagaggggctccggctttctctgaaatgaacactgctcttcagcagttcaagtacttgttctcaaaacattttctaattgattggtaggttttcataagcattgtttctttaaggcatggaaagggaagaatgctcaagcaagtcatgtttgttttcagtgggatgggcccgcgttctcactgctgggggcttccccttcatgtggcacctttgtgcaggccaccaggcagactcttcccaccttctcccactgaagcaccaagrggcttgaaccgtaatttggctaatcagaggcattttttttgtcctagtatctttcacacttgtccaaccgtcttatttttttaaaagttctgttgcttgtattaacacgaaactagagagaaatagtttctgaagccagtttattgtgaagatccccaaggggnaggttcggtagagaaaaatagtaagctggtttagaaactgacgagggcaaacagccaggacgcattggagaggaatttgccaaagatctaccctgagataacgcctgtccagtgtcttcaccacgtgaataaccagcgctccaaagtgtttttctgctttgaaaaaaaaaattccacaagcttttaaaggtgcatttaagaatccatgtgactttagaatggaactgccggccctggcaactgtcacgtgtgctagaaggttcgatgcctctggaatgcatgtgatactcatctccattttgtttccttgattgcatttttgttcttttagcagatctgtccctgtgggtggtgtctaagaagtcggacaccttggtttttgtgttagattgagctgggcagctgcaatcagcttctttatatgcaaattaggcacgacccatctgtggttcctggttggtggctaatgaagtgaggggagggagggatgtcaccccaaaagtaggccctcccattggctttggccaggccagacacttcacatcgtttacatggttctgtgtaattttaaagtttatgtgtataaagcgaagctgtttctgtgaaactgtatattttgtaaataaatatattgctactttgaggttcatgaaaaaaaaraaagcgtaataacgcgaactaccgtcatgagaggttatgcggcacggtgaacacgcggactatactctgtgaccgtgcgacgcccgaggtaagggcccctctccgcggagcccccgcacgggtgggcaaaagcccggtcttctcgcgtagaggtttccacaggcgcctgtggcccaaggcgat

SEQ ID NO: 765 - DNA, 262 bp, Homo sapiens
  misc feature (156): n equals a,t,g, or c
ggcagagccccggcggagtgtcccgcggtgggctaggggcagggccggagccgcggcgcgkagctgtgggtttgaraggttatttgtccatgggatgctcgtgttaaaacaaaaatcttcattgcaaagcttaagtaaaaacaagtctcgaccganatccttcatgatgagagatttggggacacttctctctcctgtgtgtagttgatagtttggtggtgaagagatggctgacagtgtcaaaacctttctccaggacctt

SEQ ID NO: 766 - DNA, 3072 bp, Homo sapiens
  misc feature (3072): n equals a,t,g, or c
ttcgactccttcaggttatcttgaactgcctgacttaggccagccctacagcagtgctgtttactcattggaggaacagtaccttggcttggctcttgacgtggacagaaytaaaaaggacsaagaagaggaagaagaccaagrcccaccatgccccaggctcagcagggagctgctggaggtagtagagcctgaagtcttgcaggactcactggatagatgttattcaactccttccagttgtcttgaacagcctgactcctgccagccctatggaagttccttttatgcattggaggaaaaacatgttggcttttctcttgacgtgggagaaattgaaaagaaggggaaggggaagaaaagaaggggaagaagatcaaagaaggaaagaagaaggggaagaaaagaaggggaagaagatcaaaacccaccatgccccaggctcagcagggagctgctggatgagaaagggcctgaagtcttgcaggactcactggatagatgttattcaactccttcaggttgtcttgaactgactgactcatgccagccctacagaagtgccttttayrtattggagcaacagcgtgttggcttggctgttgacatggatgaaattgaaaagtaccaagaagtggaagaagaccaagacccatcatgccccaggctcagcagggagctgctggatgagaaagagcctgaagtcttgcaggactcactggatagatgttattcgactccttcaggttatcttgaactgcctgacttaggccagccctacagcagtgctgtttactcattggaggaacagtaccttggcttggctcttgacgtggacagaattaaaaaggaccaagaagaggaagaagaccaaggcccaccatgccccaggctcagcagggagctgctggaggtagtagagcctgaagtcttgcaggactcactggatagatgttattcaactccttccagttgtcttgaacagcctgactcctgccagccctatggaagttccttttatgcattggaggaaaaacatgttggcttttctcttgacgtgggagaaattgaaaagaaggggaaggggaagaaaagaaggggaagaagatcaaagaagraaagaagaaggggaagaaaagaaggggaagaagatcaaaacccaccatgccccaggctcaacggcgtgctgatggaagtggaagagcctgaagtcttacaggactcactggatagatgttattcgactccgtcaatgtactttgaactacctgactcattccagcactacagaagtgtgttttactcatttgaggaacagcacatcagcttcgcccttkacgtggacaataggttttttactttgacggtgacaagtctccacctggtgttccagatgggagtcatattcccacaataagcagcccttastaakccgagagatgtcattcctgcaggcaggacctataggcamgtgaagatttgaatgaaastayagttccatttggaagcccagacataggatgggtcagtgggcatggctctattcctattctcaraccatgccagtggcaacctgtgctcagtctgaagacaatggacccacgttaggtgtgacacgttcacataactgtgcagcacatgccgggagtgatcagtcrgacattttaatttgaaccacgtatctctgggtagctacaaaattcctcagggatttcattttgcaggcatgtctctgagcttctatacctgctcaaggtcaktgtcatctttgtgtttagctcatccaaaggtgttaccctggtttcaatgaacctaacctcattctttgtgtcttcagtgttggcttgttttagctgatccatctgtaacacaggagggatccttggctgaggattgtatttcagaaccaccaactgctcttgacaattgttaacccgctagrctcctttggttagagaagccacagtccttcagcctccaattggtgtcagtacttaggaagaccacagctagatggacaaacagcattgggaggccttagccctgctcctctcaattccatcctgtagagaacaggagtcaggagccgctggcaggagacagcatgtcacccaggactctgccggtgcagaatatgaacaatgccatgttcttgcagaaaacgcttagcctgagtttcataggaggtaatcaccagacaactgcagaatgtrgarcactgagcaggacagctgacctgtctccttcacatagtccatrtcaccacaaatcacacaacaaaaaggagaagagatattttgggttcaaaaaaagtaaaaagataatgtagctgcatttctttagttattttgarccccaaatatttcctcawctttttgttgttgtcattgatggtggtgacatggacttgtttatagaggacaggtcagctgtctggctcartgatctacattctgaagttgtctgaaaatgtcttcatgattaaattcagcctaaacgttttgccgggaacactgcagagacaatgctgtgagtttccaaccttagcccatctgcgggcagagaaggtctagtttgtccatcagcattatcatgatatcaggactggttacttggttaaggaggggtctaggagatctgtcccttttagagacaccttacttataatgaagtatttgggagggtggttttcaaaaktagaaatgtcctgtattccgatgatcatcctgtaaacattttatcatttattaatcatccctgcctgtgtctattattatattcatatctctacgctggaaactttctgcctcaatgtttactgtgcctttgtttttgctagtgtgtgttgttgaaaaaaaaaacattctctgcctgagttttaatttttgtccaaagttattttaatctatacaattaaaagcttttgcctatcactctggactgttggattgttttttacattcagtgttataatmtttgttatgctgattggttttggtgggtactgatgtgaattaataaaaacatttcatttccaaaaaaaaaaaaaaaaaaaaaaaaaaggggggcccn

SEQ ID NO: 767 - DNA, 1321 bp, Homo sapiens
  misc feature (1321): n equals a,t,g, or c
gcgcgagcggaatctcggcgctcccggaagtggyctgaaggcggcgcgccagtcccgagcagtgctcgctcctgctcggggcgctgcggccccgggcgtcgccatgaccagtgagctggacatcttcgtggggaacacgacccttatcgacgaggacgtgtatcgcctctggctcgatggttactcggtgaccgacgcggtggccctgcgggtgcgctcgggaatcctggagcagactggcgccacggcagcggtgctgcagagcgacaccatggaccattaccgcaccttccacatgctcgagcggctgctgcatgcgccgcccaagctactgcaccagctcatcttccagattccgccctcccggcaggcactactcatcgagaggtactatgcctttgatgaggcctttgttcgggaggtgctgggcaagaagctgtccaaaggcaccaagaaagacctggatgacatcagcaccaaaacaggcatcaccctcaagagctgccggagacagtttgacaactttaaacgggtcttcaaggtggtagaggaaatgcggggctccctggtggacaatattcagcaacacttcctcctctctgaccggttggccagggactatgcagccatcgtcttctttgctaacaaccgctttgagacagggaagaaaaaactgcagtatctgagcttcggtgactttgccttctgcgctgagctcatgatccaaaactggaccctttggagccgtcggtgaaggmcccattggagccgtcgactcacagatggatgacatggacatggacttagacaaggaatttctccaggacttgaaggagctcaaggtgctagtggctgacaaggaccttctggacctgcacaagagcctggtgtgcactgctctccggggaaagctgggcgtcttctctgagatggaagccaacttcaagaacctgtcccgggggctggtgaacgtggccgccaagctgacccacaataaagatgtcagagacctgtttgtggacctcgtggagaagtttgtggaaccctgccgctccgaccactggccactcagcgacgtgcggttcttcctgaatcagtattcagcgtctgtccactccctcgatggcttccgacaccaggcctctgggaccgctacatgggcaccctccgcggctgcctcctgcgcctgtatcatgactgaggtgcctcccaacgctccgcccacgctgacaataaagttgctctgagtttggaaaaaaaaaaaaaaaaaaaaaaaaaaaaaaaaaaaaaaaaaaaaaaaaaaaaaaaaaaaaaaaaaaan

SEQ ID NO: 768 - DNA, 1532 bp, Homo sapiens
  misc feature (1523): n equals a,t,g, or c
ggtgcattcgtgaaattctgcagcacatcggcgaaagtgatttaaatctaccacccagctgtagttgaatctacaatctgctcagggatttatactcaatgccaatttgatatcatgctgggagggactgattgcagaaccttcttgacaagccacataaatctaaagaaaacgttgtgtgacgtgatcctcatggtccaggaaagaaagatacctgctcatcgtgttgttcttgctgcagccagtcatttttttaacttaatgttcacaactaacatgcttgaatcaaagtcctttgaagtagaactcaaagatgctgaacctgatattattgaacaactggtggaatttgcttatactgctagaatttccgtgaatagsaacaatgttcagtctttgttggatgcagcaaaccaatatcagrttgaacctgtgaagaaaatgtgtgttgattttttgaaagaacaagttgatgcttcaaattgtcttggtataagtgtgctagcggagtgtctagattgtcctgaattgaaagcaactgcagatgactttattcatcagcactttactgaagtttacaaaactgatgaatttcttcaacttgatgtcaagcgagtaacacatcttctcaaccaggacactctgactgtgagagcagaggatcaggtttatgatgctgcagtcaggtggttgaaatacgatgaacctaatcgccagccatttatggttgatatccttgctaaagtcaggtttcctcttatatcaaagaatttcttaagtaaaacggtacaagctgaaccacttattcaagacaatcctgaatgccttaagatggtgataagtggaatgaggtaccatctactgtctccagaggaccgagaagaacttgtagrtggcacaagacctagaagaaagaaacatgactaccgcatagccctatttggaggctctcaaccacagtcttgtagatattttaacccaaaggattatagctggacagacatccgctgcccctttgaaaaacgagagatgcagcatgcgtgttttgggacaatgtagtatacattttgggaggctctcagcttttcccaataaagcgaatggactgctataatgtagtgaaggatagctggtattcgaaactgggtcctccgacacctcgagacagccttgctgcatgtgctgcagaaggcaaaatttatacatctggaggttcagaagtaggaaactcagctctgtatttatttgagtgctatgatacgagaactgaaagctggcacacaaagcccagcatgctgacccagcgctgcagccatgggatggtggaagccaatggcctaatctatgtttgtggtggaagtttaggaaacaatgtttctgggagagtgcttaattcctgtgaagtttatgatcctgccacagaaacatggactggctgtgtccatgattgagccaggaggatcatgggtggtatttttaaagacagtattttgctgtggggtggtccagattggttttaggtngtcttggac

SEQ ID NO: 769 - DNA, 2569 bp, Homo sapiens
gtggccagcgggcaccctcggcccgacatcacgtggatgaaggacgaccaggccttgacgcgcccagaggccgctgagcccaggaagaagaagtggacactgagcctgaagaacctgcggccggaggacagcggcaaatacacctgccgcgtgtcgaaccgcgcgggcgccatcaacgccacctacaaggtggatgtgatccagcggacccgttccaagcccgtgctcacaggcacgcaccccgtgaacacgacggtggacttcggggggaccacgtccttccagtgcaaggtgcgcacgacgtgaagccggtgatccagtggctgaagcgcgtggagtacggcgccgagggccgccacaactccaccatcgatgtgggcggccagaagtttgtggtgctgcccacgggtgacgtgtggtcgcggcccgacggctcctacctcaataagctgctcatcacccgtgcccgccaggacgatgcgggcatgtacatctgccttggcgccaacaccatgggctacagcttccgcagcgccttcctcaccgtgctgccagacccaaaaccgcaagggccacctgtggcctcctcgtcctcggccactagcctgccgtggcccgtggtcatcggcatcccagccggcgctgtcttcatcctgggcaccctgctcctgtggctttgccaggcccagaagargccgtgcrcccccgcgcctgcccctcccctgcctgggcaccgcccgccggggacggccckcgaccgcagcggagacaaggaccttccctcgttggccgccctcagcgctggccctggtgtggggctgtgtgaggagcatgggtctccggcagccccccagcacttactgggcccaggcccagttgctggccctaagttgtaccccaaactctacacagacatccacacacacacacacacacactctcacacacactcacacgtggagggcaaggtccaccagcacatccactatcagtgctagacggcaccgtatctgcagtgggcacgggggggccggccagacaggcagactgggaggatggaggacggagctgcagacgaaggcaggggacccatggcgaggaggaatggccagcaccccaggcagtctgtgtgtgaggcatagcccctggacacacacacacagacacacacactrcctggatgcatgtatgcacacacatgcgcgcacacgtgctccctgaaggcacacgtacgcacacacgcacatgcacagatatgccgctgggcacacagataagctgcccaawtgcacgcacacgcacagagacwtgccagaacwtacaaggacwtgctgcctgaacatacacacgcacacccatgcgcagatgtgctgcctggacacacacacacacacggatatgctgtctggacgcacacacgtgcagatatggtatccggacacacacgtgcacagatatgctgcctggacacacagataatgctgccttgacacacacatgcacggatattgcctggacacacacacacacacgygtgcacagatatgctgtctggacasgcacacacatgcagatatgctgcctggacacacacttccagacacacgtgcacaggcgcagatatgctgcctggacacacgcagatatgctgtctwgtcacacacacacgcakacatgctgtccggacacacacacgcatgcacagatatgctgtccggacacacacacgcacgcagatatgctgcctggacacacacacagwtaatgctgcctcaacactcacacacgtgcagatattgcctggacacacacatgtgcacagatatgctgtctggacatgcacacacgtgcagatatgctgtccggatacacacgcacgcacacatgcagatatgctgcctgggcacacacttccggacacacatgsrcacacaggtgcagatatgctgcctggacacacgcagactgacgtgcttttgggagggtgtgccgtgaagcctgcagtacgtgtgccgtgagctcatagttgatgagggactttccctgctccaccgtcactcccccaactctgcccgcctctgtmcccgcctyagtccccgsctccatccccgsctctgtcccctggccttggcggctatttttgccacctgccttgggtgcccaggagtcccctactgctgtgggctggggttgggggcacagcagccccaagcctgagaggctggagcccatggctagtggctcatccccactgcattctccccctgacacagagaaggggccttggtatttatatttaagaaatgaagataatattaataatgatggaaggaagactgggttgcagggactgtggtctctcctggggcccgggacccgcctggtctttcagccatgctgatgaccacaccccgtccaggccagacaccaccccccaccccactgtcgtggtggccccagatctctgtaattttatgtagagtttgagctgaagccccgtatatttaatttattttgttaaacatgaaagtgcatcctttccctccaaaaaaaaaaaaaaaaaaaaaaa

SEQ ID NO: 770 - DNA, 1637 bp, Homo sapiens
aaaagctggagctccaccgcggtggcggccgctctagaactagtggatcccccgggctgcaggaattcggcacgagaaacctgcggaaaatggtagcgatggcggctgggccgagtgggtgtctggtgccggcgtttgggctacggttgttgttggcgactgtgcttcaagcggtgtctgcttttggggcagagttttcatcggaggcatgcagagagttaggcttttctagcaacttgctttgcagctcttgtgatcttctcggacagttcaacctgcttcagctggatcctgattgcagaggatgctgtcaggaggaagcacaatttgaaaccaaaaagctgtatgcaggagctattcttgaagtttgtggatgaaaattgggaaggttccctcaagtccaagcttttgttaggagtgataaacccaaactgttcagaggactgcaaatcaagtatgtccgtggttcagaccctgtattaaagcttttggacgacaatgggaacattgctgaagaactgagcattctcaaatggaacacagacagtgtagaagaattcctgagtgaaaagttggaacgcatataaatcttgcttaaattttgtcctatccttttgttaccttatcaaatgaaatattacagcacctagaaaataatttagttttgcttgcttccattgatcagtcttttacttgaggcattaaatatctaattaaatcgtgaaatggcagtatagtccatgatatctaaggagttggcaagcttaacaaaacccattttttataaatgtccatcctcctgcatttgttgataccactaacaaaatgctttgtaacagacttgcggttaattatgcaaatgatagtttgtgataattggtccagttttacgaacaacagatttctaaattagagaggttaacaagacagatgattactatgcctcatgtgctgtgtgctctttgaaaggaatgacagcagactacaaagcaaataagatatactgagcctcaacagattgcctgctcctcagagtctctcctatttttgtattacccagctttctttttaatacaaatgttatttatagtttacaatgaatgcactgcataaaaactttgtagcttcattattgtaaaacatattcaagatcctacagtaagagtgaaacattcacaaagatttgcgttaatgaagactacacagaaaacctttctagggatttgtgtggatcagatacatacttggcaaatttttgagttttacattcttacagaaaagtccatttaaaagtgatcatttgtaagaccaaaatataaataaaaagtttcaaaaatctatctgaatttggaattcttctggtttgttctttcatgtttaaaaatgatgtttttcaatgcatttttttcatgtaagccctttttttagccaaaatgtaaaaatggctgtaatatttaaaacttataacatcttattgttggtaatagtgctttatatttgtctgattttatttttcaaagttttttcatttatgaacacattttcattggtatattatttaaggaatatctcttgatatagaatttttatattaaaaatgatttttctttgcttaaaaaaaaaaaaaaaaaactcga

SEQ ID NO: 771 - DNA, 2485 bp, Homo sapiens
  misc feature (2479): n equals a,t,g, or c
gatttacacagcatcatgtattgaatattgatttctcctttttcatagcattgaaaaggtgattatatatgtgttggtctagttctgtgctattttttttccactggcctgtttgtctatcctttgtttactaccaccaagctataactcttgatagctggtaatgaagtcttccaattttgttcaccctcaagattgtcttctggcttttcgtatttccaaataaattgtaaaattgatttgccatttttcacacacacaccccttgctggtttcttgattgggattgcattaagtcttttgatgatttgagaattgacatccttacagtattgagtattctaacctgtgaatatggtagaaaccattgtgtattcagttatttgatttctttcagttatgttttataattttctgtgtagaggtcttgtatatgtttcattagatttattctttggtatttgttttttgatactattataaatggtattgttttaaatttttattttctaattatagcaacttgtatgtagagtcatgtgccactttatgatggggatatgagaaatgcattgttaggcagtttcatcatgcaaacatcatagagtgtacttacgcaaatcatgcaaacatcatagagtgtacttacacaaacctaaatggtacatgctgctacacaccttagctgtatgatatagccagttgctcctagactgcaaacctatacagcatgttactctactgaataccgtaagcagttgtgacacaatgatgagtatttgggtatctaaacatatctaagcatttttaaaatgtacagtaaaaatgtaaaaagtaaaacatggtacacctgtttagggcacttaccgtgaatggagcttgcaagactagaagttgctctggaagaatcagtgaatgagtgaatkcttaggacatcactatacactactgtagactttataaacactgcacacttaggctacactaaatttatttttaaaataaagtaattgcaatatgatgttatgacagctatgatgccactaggcagcagaaattcctgagctccattataatcttataagaccaccgttgtatatgtgatccttcgttatgtgggacatgactcgatataaaatggattgttatattgaccttttatctgatgacttaactaaatttacttattaattttactagttatctatagtctcatttttcctgtgtacacaattaatttatttgtaaatactaaatgtttccttttttcattactcatatatttttttcttgccttactacactgcctagtaaaatatataaaatatgtgcttcacggaaaggggactttgattaaggacatgcctccttcagagctttttcttttccccctagtatttccaacttggggatgtttggcatcgacgaatttactgcagtgattaaccctcctcaggcctgcattttggcggttgggaggttccgacctgtgctgaagctcactgaggatgaagagggaaatgccaaactgcagcagcgccagctcataacagtcacaatgtcaagtgacagtcgagtggttgatgacgaactggcaaccaggtttcttaaaagttttaaagcaaacctagagaatcctatccgacttgcctagtcctcaaagataagaagttggtgttcagcttagttgattcagtagttgttaccaagaaacatatgttataggaaaacaacttggtatttaagtatgaagtggatgaaatgtttatttatttaaggtgaaagcatttgacccagggtgtcttcatcttcaatttgggtttaatgttatagaaataaatgatgataaactctaactaataaaggaaagagaatatttggttactcagatccatttttaacctctggtgctgtataaagggaatattaaactagatgtaaatcaaagtatatgtttggctcatttgagcattttggaatatttgagaatgtatgatacatgtaaaattaaaaaaactattagaactgtaccataattatgttgaaggtagaagtgatcttcaaagagatggccattaacttagcagtgggacctcacttttacaagcactgctctagatatacttgaagaatttaatakgtacagaagtttattctggataataaataaataaggatcacactgtattaggggttatggcaacattattgaattttttatgtacataaagccatatgtttagggtggtttctatctgtcttgtttttcacttatataacactgtgaacttctaaagmaagaggataaaagaagcatgaatgaaaagaatgacatttcaaaaaaatggttcaatgaaaaactatagctaaaatatgtaaacctttctaggtaaaccgcttgccttcatcttgagtcggaatatatttaaataaattgtgttatctcttgccaaaaaaaaaaaaaaaaaaaaaaaaaaangggggg

SEQ ID NO: 772 - DNA, 432 bp, Homo sapiens
  misc feature (378): n equals a,t,g, or c
gggataaagggtccatggacagaaagctgcttgggaggacccagtggaatgggtcygggacacacttccctggccatcagccaacaagaccaatcaaagctgtaccacctgcccccacccaccgtgggccctcacagcattgcctcacctcccgaggataggacagtcaaagacagcaccccaagttctctggactcagatcctctgatggccatgctgctgaaacttcaagaagctgccaactacattgagtctccagatcgagaaaccatcctggaccccaaccttcaggcaacactttaagggttcggcaatcactgtcacccccggacagcagaacgcttggcatcagcttatctttagctcctccttcttccncttctccttcttttcaagagcacttggctcttccagccccaaggaggaagaaca

SEQ ID NO: 773 - DNA, 1048 bp, Homo sapiens
gaaaaaattaaaaagaaaaattgttttgaaaatgtacagatcaagtccaatattttgattatccacctgcatgttttattaaatattttgataatgtggatgtttacactttgcatgatattagcagagtaccactagtaatgcacaaacatgtacaatatggtcattcataaccgatttttatagaatactttttacatgtgcaactccatccgttatgtaaggattacatgaatattgcacattcccttctggtttcacaaacccatttatacatatttcttagtgaggctcattgtacatgtattgaagctagaatcgagtcaagaaaaataaagccccattctccaactgcaaaatgtgctttcccataatgaacactagtcaccagcacagaataatctccaacattttctaaattctaattgccaactgtttctatttatatttgatttatatttcatttggagtctgttacatggcagcttaggcagactagatcttgttttttcccaatgcagcataatgagtatgatctatttcttttcaaataatctttgagatcccaggaaaaaaaaaatgctctgctccattgagctataatgtaaatgtgtttgtttaaaaaacaggtgaggcaagtgagtgatttattgttcctgaggaagtatatctgattttttttctcatactccaaaagctagtccctactctttaataaaaataatgggtaactttttgtttttcactagcgaacttccatgacatttcctttctatgtagtgtgattaatgcaatacatattatagttatctatacacagtgtaagatttaacaaactgaaatgatccacctcatatgtgagtccgtccaaaagatgttactgctctgggtgggccagtgttctatatcggttatactaactttcatttaaagtatttattctaaaatgcctctgagaaacagtaaaaaataaaaacaacaagttgtctaaaatgcaacagcttttatagtaaatgtacatttataaataaaatactcaaatcaaaaa

SEQ ID NO: 774 - DNA, 1019 bp, Homo sapiens
  misc feature (971): n equals a,t,g, or c
ggcacgascacctttccagggccgcccaataactccagtatacacggtggctccaaacgttcagagaattcctactgccgggatctacggggccagttacgtgccatttgctgctccagctacagccacgatcgscacactacagaagaacgcggcagccgcggccgccgtgtatggaggatacgcaggctacatacctcaggccttccctgctgctgccattcaggtccccatccccgacgtctaccagacatactgaggctggtgaccagcacgaagacagaccacacaaacaccactgaaggaacgcttgactatttatgaagaaggaacatgttggattcacacatgcaacctgaaagtgaagaatgttagcagatttatttctgaattattttatatacatgaagttttcactagttttttaagactattttcaacttagcatgcctacgttcatacatttccaaaagacttgcaatggttcgtgccttcattccatcttttaaaaatttgtatgctgtactacatttgtatagaggtttttgttgttgtttttttaaggatatattttcagtatgaaggttattttcttaacttctgcactccagagatttctattttgtagtaccttcaataatatatcaactatatattaaaaaagcacacttgaggagctagggaactattttgaaaaatatatacaatatttaaagatacaaacagtagtgcttaaaawtactacataaagcattattttaaaggttatactggaaagtgcawttttaaaatgrgtaaaaccyctgtatttcygctggcattaagggtkgatggtgttaccatgtatcatcatggcggtactattttttaaaagaaattaaacactggatctctccttaagccaacattgaaaagacttgccgcacttctgagtccaaacactggaaagctctcctttgccaccgttaggnggggctcattctccatgtgccttagccttaaacatgcccccactccgc

SEQ ID NO: 775 - DNA, 2248 bp, Homo sapiens
gggccgcccgcgtaggaaggcacggccggcggcggcggagcgcagcgatggccgggcgagggggcagcgcgctgctggctctgtgcggggcactggctgcctgcgggtggctcctgggcgccgaakcccakgakcccggggcgcccgcggcgggcatgaggcggcgccggcggctgcagcaagaggacggcatctccttcgagtaccaccgctaccccgagctgcgcgaggcgctcgtgtccgtgtggctgcagtgcaccgccatcagcaggatttacacggtggggcgcagcttcgagggccgggagctcctggtcatcgagctgtccgacaaccctggcgtccatgagcctggtgagcctgaatttaaatacattgggaatatgcatgggaatgaggctgttggacgagaactgctcattttcttggcccagtacctatgcaacgaataccagaaggggaacgagacaattgtcaacctgatccacagtacccgcattcacatcatgccttccctgaacccagatggctttgagaaggcagcgtctcagcctggtgaactcaaggactggtttgtgggtcgaagcaatgcccagggaatagatctgaaccggaactttccagacctggataggatagtgtacgtgaatgagaaagaaggtggtccaaataatcatctgttgaaaaatatgaagaaaattgtggatcaaaacacaaagcttgctcctgagaccaaggctgtcattcattggattatggatattccttttgtgctttctgccaatctccatggaggagaccttgtggccaattatccatatgatgagacgcggagtggtagtgctcacgaatacagctcctccccagatgacgccattttccaaagcttggcccgggcatactcttctttcaacccggccatgtctgaccccaatcggccaccatgtcgcaagaatgatgatgacagcagctttgtagatggaaccaccaacggtggtgcttggtacagcgtacctggagggatgcaagacttcaattaccttagcagcaactgttttgagatcaccgtggagcttagctgtgagaagttcccacctgaagagactctgaagacctactgggaggataacaaaaactccctcattagctaccttgagcagatacaccgaggagttaaaggatttgtccgagaccttcaaggtaacccaattgcgaatgccaccatctccgtggaaggaatagaccacgatgttacatccgcaaaggatggtgattactggagattgcttatacctggaaactataaacttacagcctcagctccaggctatctggcaataacaaagaaagtggcagttccttacagccctgctgctggggttgattttgaactggagtcattttctgaaaggaaagaagaggagaaggaagaattgatggaatggtggaaaatgatgtcagaaactttaaatttttaaaaaggcttctagttagctgctttaaatctatctatataatgtagtatgatgtaatgtggtcttttttttagattttgtgcagttaatacttaacattgatttattttttaatcatttaaatattaatcaactttccttaaaataaatagcctcttaggtaaaaatataagaacttgatatatttcattctcttatatagtattcattttcctacctatattacacaaaaaagtatagaaaagatttaagtaattttgccatcctaggcttaaatgcaatattcctggtattatttacaatgcagaattttttgagtaattctagctttcaaaaattagtgaagttcttttactgtaattggtgacaatgtcacataatgaatgctattgaaaaggttaacagatacagctcggagttgtgagcactctactgcaagacttaaatagttcagtataaattgtcgtttttttcttgtgctgactaactataagcatgatcttgttaatgcatttttgatgggaagaaaaggtacatgtttacaaagaggttttatgaaaagaataaaaattgacttcttgcttgtacatataggagcaatactattatattatgtagtccgttaacactacttaaaagtttagggttttctcttggttgtagagtggcccagaattgcattctgaatgaataaaggttaaaaaaaaaaaaaaaaaaaaaaaaaaaaaaaaaaaaaaaaaaaaaaaaaaaaaaaaaaaaaaaaaaaactcgag

SEQ ID NO: 776 - DNA, 1605 bp, Homo sapiens
aaggaagtcacatggaagaggggcggtagttggttgtgggcactgggttagaggtatcacgtgggggcactttcgtcttagcttttggacaagacgcaggcgcaacccacggctgctgcggggatccttgtggcccttccggtcgrtggaaccaatccgtgcacagagaagcggggcgaactgaggcgagtgaagtggactctgagggctaccgctaccgccactgctgcggcaggggcgtggagggcagagggccgcggaggccgcagttgcaaacatggctcagagcagagacggcggaaacccgttcgccgagcccagcgagcttgacaacccctttcaggacccagctgtgatccagcaccgacccagccggcagtatgccacgcttgacgtctacaacccttttgagacccgggagccaccaccagcctatgagcctccagcccctgccccattgcctccaccctcagctccctccttgcagccctcgagaaagctcagccccacagaacctaagaactatggctcatacagcactcaggcctcagctgcagcagccacagctgagctgctgaagaaacaggaggagctcaaccggaaggcagaggagttggaccgaaggagcgagagctgcagcatgctgccctgggaggcacagctattcagccctgctttttccaggacatctccatggagatcccccaagaatttcagaagactgtatccaccatgtactacctctggatgtgcagcacgctggctcttctcctgaacttcctcgcctgcctggccagcttctgtgtggaaaccaacaatggcgcaggctttgggctttctatcctctgggtcctccttttcactccctgctcctttgtctgctggtaccgccccatgtataaggctttccggagtgacagttcattcaatttcttcgttttcttcttcattttcttcgtccaggatgtgctctttgtcctccaggccattggtatcccaggttggggattcagtggctggatctctgctctggtggtgccgaaggcaacacagcagtatccgtgctcatgctgctggtcgccctgctcttcactggcattgctgtgctaggaattgtcatgctgaaacggatccactccttataccgccgcacaggtgccagctttcagaaggcccagcaagaatttgctgctggtgtcttctccaaccctgcggtgcgaaccgcagctgccaatgcagccgctggggctgctgaaaatgccttccgggccccgtgacccctgactgggatgccctggccctgctacttgagggagctgacttagctcccgtccctaaggtctctgggacttggagagacatcactaactgatggctcctccgtagtgctcccaatcctatggccatgactgctgaacctgacaggcgtgtggggagttcactgtgacctagtccccccatcaggccacactgctgccacctctcacacgccccaacccagcttccctctgctgtgccacggctgttgcttcggttatttaaataaaaagaaagtggaactggaactgaaaaaaaaaaaaaaaaaaaaaaaaaaagggsggccgc

SEQ ID NO: 777 - DNA, 1808 bp, Homo sapiens
  misc feature (1457): n equals a,t,g, or c
  misc feature (1806): n equals a,t,g, or c
gaagaccggtccggaattcccgggtcaccacgmgtccaccagcacagcaaacccgccgggatcaaagtgtaccagtcggcagcatggctacgaaatgtgggaattgtggacccggctactccacccctctggaggccatgaaaggacccagggaagagatcgtctacctgccctgcatttaccgaaacacaggcactgaggccccagattatctggccactgtggatgttgaccccaagtctccccagtattgccaggtcatccaccggctgcccatgcccaacctgaaggacgagctgcatcactcaggatggaacacctgcagcagctgcttcggtgatagcaccaagtcgcgcaccaagctggtgctgcccagtctcatctcctctcgcatctatgtggtggacgtgggctctgagccccgggccccaaagctgcacaaggtcattgagcccaaggacatccatgccaagtgcgaactggcctttctccacaccagccactgcctggccagcggggaagtgatgatcagctccctgggagacgtcaagggcaatggcaaagggggttttgtgctgctggatggggagacgttcgaggtgaaggggacatgggagagacctgggggtgctgcaccgttgggctatgacttctggtaccagcctcgacacaatgtcatgatcagcactgagtgggcagctcccaatgtcttacgagatggcttcaaccccgctgatgtggaggctggactgtacgggagccacttatatgtatgggactggcagcgccatgagattgtgcagaccctgtctctaaaagatgggcttattcccttggagatccgcttcctgcacaacccagacgctgcccaaggctttgtgggctgcgcactcagctccaccatccagcgcttctacaagaacgagggaggtacatggtcagtggagaaggtgatccaggtgccccccaagaaagtgaagggctggctgctgcccgaaatgccaggcctgatcaccgacatcctgctctccctggacgaccgcttcctctacttcagcaactggctgcatggggacctgaggcagtatgacatctctgacccacagagaccccgcctcacaggacagctcttcctcggaggcagcattgttaagggaggccctgtgcaagtgctggaggacgaggaactaaagtcccagccagagcccctagtggtcaagggaaaacgggtggctggaggccctcagatgatccagctcagcctggatgggaagcgcctctacatcaccacgtcgctgtacagtgcctgggacaagcagttttaccctgatctcatcagggaaggctctgtgatgctgcaggttgatgtagacacagtaaaaggagggctgaagttgaaccccaacttcctggtggacttcgggaaggagccccttggcccagcccttgcccatganstccgctaccctgggggcgattgtagctctgacatctggatttgaactccaccctcatcacccacactccctattttgggccctcacttccttggggacctggcttcattctgctctctcttggcacccgacccttggcagcatgtaccacacagccaagctgagactgtggcaatgtgttgagtcatatacatttactgaccactgttgcttgttgctcactgtgctgcttttccatgagctcttggaggcaccaagaaataaactcgtaaccctgtccttcaaaaaaaaaaaaaaaaaaaaaaaaaaggggggcgctctaaaagatcctccaagggccaagcttacnct

SEQ ID NO: 778 - DNA, 1484 bp, Homo sapiens
  misc feature (1405): n equals a,t,g, or c
  misc feature (1479): n equals a,t,g, or c
ccgcggcgaacgggaagtgagcaggcgcgcgggctcggcgcgcgcaggcgcgactagggtgcagcgccaggtccggtgttggggtgtccgagttgccgccggagaggagtggcctcgcccgcttgagttttgattcatcatggataatctgtcatcagaagaaattcaacagagagctcaccagattactgatgagtctctggaaagtacgaggagaatcctgggtttagccattgagtctcaggatgcaggaatcaagaccatcactatgctggatgaacaaaaggaacaactaaaccgcatagaagaaggcttggaccaaataaataaggacatgagagagacagagaagactttaacagaactcaacaaatgctgtggcctttgtgtctgcccatgtaatagaacaaagaactttgagtctggcaaggcttataagacaacatggggagatggtggagaaaactcaccttgcaatgtagtatctaaacagccaggcccggtgacaaatggtcagcttcagcaaccaacaacrggagcagccagtggtggatacattaaacgcataactaatgatgccagagaagatgaaatggaagagaacctgactcaagtgggcagtatcctgggaaatctaaaagacatggccctgaacataggcaatgagattgatgctcaaaatccacaaataaaacgaatcacagacaaggctgacaccaacagagatcgtattgatattgccaatgccagagcaaagaaactcattgacagctaaagctactgctgttcttctttatcatttattcacttccgtagctcctccttgaaagttattaccttttcagagtttaagttttcggttccacgstcttctaattgggagataatatggaagaagggccagagcagttacagccctccttcttttttgttttctgttgagggccgactgctgctctgccttccttctagtattttctttctcaattcatacgcttagattggttttcatatgtcatgtttagtgttttcatcctcctcatatacttcagcaggttcttttgctttcaagatttggaagcattgccaaagacagccatgaagaaggaagctgtagaggtgttttttgttgttgtttatttttgcttttgtggttgagggaaggacaagagataagaggttgttacctcagtaaaaaccttcaggccacaaagcaaaaagttgcatagccacaacgaagatctagttggatatagtttttgatttaagttgcagttatagccaatttaggctaatgcttggttttggagcttttatacacaacgtttttgttaggcatcacagttttgcaacctctgctccaaagrgaaaaatagratgagttttctttctttttttttttttngggagtcagagtctcgctcycytgkccmrggctgggagtgccawagcgcgatctggggctccactgccaacctnccgcc

SEQ ID NO: 779 - DNA, 1343 bp, Homo sapiens
  misc feature (1313): n equals a,t,g, or c
ttaaataaacagatgctctcacctgggaagaggagacagggaggggaaccaattgaagaaagaggagaaaagtcttagagtgtggaaaaggcaaccaggttggccgtaaggtgcctgctggaatgcgtgtgcctccacacgggtctgggcatccggactgataaccagccggccagactgagggatggaaggcactgagatgggggcccgtccaggcggacacccgcagaaatggagctttctgtggtctcttgcactctggctgcctcttgccctctctgtgtctctctttcttggtctctccctctctcctcctcagcctggtctttctctttggtgcacacttagttattgttgtgagcaatggaagttcaaaggaactccctctccagctcttctgaatcttgggacacagcctaaaaaggacaaaaagttagaagacagcatagcaactcagctcagggagctaccagagaaaaatagcaactgatgtgggtgctttttttttttttttaatttgaataaaaagaattagaagtgatgtccttttataaaatgccttctcccccttcccgcctacagtctcttcctctccccttagaggggggaaagtgtataaacctacagggttgtgagtctgaaaagaggatccccctcacccccaccctgggcagagcagtgggggttggggggtgggagagggggacacagatcctggcacactgtggatatttcttgcagattgcagtctcttgtggcccaaacaggttaggtagactatcgcctctggcaggtgccaccttttggtaccaacatgttctgaggtgttaggatttgggttgggttttttttgtttgttttttttttccttttggtctttttttttttctccttttaaagaaaagctaaaggccgctgtgagtcctggtggcaggctctccatggatgtagcatatcgaagataatttttatactgcatttttatggattattttgtaatgtgtgattccgtctgctgaggaggtgggaggggctccagggaaagccacccaccttcagtgaggttgctccccagctgagcgcaccgggcatgggatgtggaggctggcgacacaccctgtgcctctccaaggctgggcgcgtggggcgtccagagtctctctgggtctcagatgtccatctgccacctcttgttaaggctctagccagaagggagggtgagggtagaagaaagttattcccgaagaaaaaaagaatgaaaagtcattgtactgaactgtttttatatttttaaaagttactatttaaaggtnaaaaaaaaagggggggcccggtacccaatt

SEQ ID NO: 780 - DNA, 453 bp, Homo sapiens
  misc feature (170): n equals a,t,g, or c
  misc feature (225): n equals a,t,g, or c
  misc feature (258): n equals a,t,g, or c
  misc feature (282): n equals a,t,g, or c
  misc feature (287): n equals a,t,g, or c
  misc feature (291): n equals a,t,g, or c
  misc feature (297): n equals a,t,g, or c
  misc feature (299): n equals a,t,g, or c
  misc feature (307): n equals a,t,g, or c
  misc feature (339): n equals a,t,g, or c
  misc feature (340): n equals a,t,g, or c
  misc feature (341): n equals a,t,g, or c
  misc feature (342): n equals a,t,g, or c
  misc feature (351): n equals a,t,g, or c
  misc feature (361): n equals a,t,g, or c
  misc feature (362): n equals a,t,g, or c
  misc feature (364): n equals a,t,g, or c
  misc feature (365): n equals a,t,g, or c
  misc feature (366): n equals a,t,g, or c
  misc feature (375): n equals a,t,g, or c
  misc feature (378): n equals a,t,g, or c
  misc feature (381): n equals a,t,g, or c
  misc feature (382): n equals a,t,g, or c
  misc feature (389): n equals a,t,g, or c
  misc feature (390): n equals a,t,g, or c
  misc feature (394): n equals a,t,g, or c
  misc feature (395): n equals a,t,g, or c
  misc feature (398): n equals a,t,g, or c
  misc feature (406): n equals a,t,g, or c
  misc feature (417): n equals a,t,g, or c
  misc feature (420): n equals a,t,g, or c
  misc feature (421): n equals a,t,g, or c
  misc feature (425): n equals a,t,g, or c
  misc feature (428): n equals a,t,g, or c
  misc feature (430): n equals a,t,g, or c
  misc feature (431): n equals a,t,g, or c
  misc feature (432): n equals a,t,g, or c
  misc feature (433): n equals a,t,g, or c
  misc feature (443): n equals a,t,g, or c
aattcggcacgagaggctaggcacagtggctcacacctgtaatccttgcattttggaaggctgaggcaggaggatcactttaggcctggtgtgttcaagaccagcctggtcaacatagtgagacactgtctctaccaaaaaaaggaaggaagggacacatatcaaactgnaacaaaattagaaatgtaattatgttctaagtgcctccaagttcaaaacttattngaatgttgagagtttggttacggaattcggttnggggggccaaagggttgttttagnttttnaatnccggtntntttcgggnaacccttgggaatttttggggctccttgtagnnnnccccctttnggaggggggnntnnntttgttttnccnccnnggggggnntttnnttnggggggancttttttttcnccnngttnggntnnnnggtttttttngggttttttt

SEQ ID NO: 781 - DNA, 498 bp, Homo sapiens
  misc feature (19): n equals a,t,g, or c
  misc feature (120): n equals a,t,g, or c
  misc feature (421): n equals a,t,g, or c
  misc feature (428): n equals a,t,g, or c
  misc feature (430): n equals a,t,g, or c
  misc feature (459): n equals a,t,g, or c
aattcggcacgaggtgctnatagtcccactacttgtggggctaaggcaggaggatcacttgagccccggaggtcgaggctacagtgagccaagagtgcactactgtactccagccagggnaagagagcgagaccctgtctcaataaataaataaataaataaataaataaataaataaaaacaaagttgattaagaaaggaagtataggccaggcacagtggctcacacctgtaatccttgcattttggaaggctgaggcaggaggatcactttaggcctggtgtgttcaagaccagcctggtcaacatagtgaggacactgtctcttaccaaaaaaaggagggaagggacacatttcaaatgaaacaaattagaatgttatttatgttctaagtgcctccagttcaaaattttttggatntttgagntntggttacggaatacgttagggggccaaanggatttgtaagtctttaatgccgttttttcagaaaccta

SEQ ID NO: 782 - DNA, 541 bp, Homo sapiens
  misc feature (29): n equals a,t,g, or c
  misc feature (319): n equals a,t,g, or c
  misc feature (333): n equals a,t,g, or c
  misc feature (350): n equals a,t,g, or c
  misc feature (371): n equals a,t,g, or c
  misc feature (372): n equals a,t,g, or c
  misc feature (374): n equals a,t,g, or c
  misc feature (390): n equals a,t,g, or c
  misc feature (396): n equals a,t,g, or c
  misc feature (431): n equals a,t,g, or c
  misc feature (443): n equals a,t,g, or c
  misc feature (452): n equals a,t,g, or c
  misc feature (460): n equals a,t,g, or c
  misc feature (492): n equals a,t,g, or c
  misc feature (499): n equals a,t,g, or c
  misc feature (539): n equals a,t,g, or c
acacctaaatgtttttatttttgagaagnggggacagagtctcactatgtcacccaggctggagtgcaatggcatgatctcagctcactgcaaccttcgcctcctgggttcaagcgattctcctgcctccgcctcctgagtagctgggattataggcacacaccaccacgcccagctaattttttgtatttttagtagagacagagtttcaccatgttggccaggctggtcttggaactcctggaccttgtggatccacccacctcggcctcccagagtgctggggattacagggcatgagccaccacggcttgggctnaaggaacacctaanttttatgtttcttgggntcaaaaaccagtttccattcnnangttgtcctcacaaganggttantggtggtggagacagcaggggagggagggaagagngtggtttgtaantggttcaantcaggcantaagcgattttagctttaatttaaagtcttcngtccagntttaagcacttggtaagacagggctggaagtagcttttcnaa

SEQ ID NO: 783 - DNA, 586 bp, Homo sapiens
  misc feature (25): n equals a,t,g, or c
  misc feature (28): n equals a,t,g, or c
  misc feature (30): n equals a,t,g, or c
  misc feature (33): n equals a,t,g, or c
  misc feature (150): n equals a,t,g, or c
  misc feature (199): n equals a,t,g, or c
  misc feature (330): n equals a,t,g, or c
  misc feature (352): n equals a,t,g, or c
  misc feature (359): n equals a,t,g, or c
  misc feature (373): n equals a,t,g, or c
  misc feature (426): n equals a,t,g, or c
  misc feature (435): n equals a,t,g, or c
  misc feature (441): n equals a,t,g, or c
  misc feature (458): n equals a,t,g, or c
  misc feature (468): n equals a,t,g, or c
  misc feature (482): n equals a,t,g, or c
  misc feature (485): n equals a,t,g, or c
  misc feature (490): n equals a,t,g, or c
  misc feature (554): n equals a,t,g, or c
  misc feature (569): n equals a,t,g, or c
  misc feature (577): n equals a,t,g, or c
gggtcgacccacgcgtccgcgatgncgngncanacttccggtgtgggtgacgagtggtggccgaagcagggggacagcaagggacgctcaggcgggcgaccatggcggacggcggctcggagcgggctgacgggcgcatcgtcaagatgnaggtggactacagcgccacggtggatcagcgcctacccgagtgtgcgantagccaaggaaggaagacttcaagaagtcattgaaacccttctctctctggaaaagcagactcgtactgcttccgatatggtatcgacatcccgtatcttagttgccagtagtggaagatgtgctaatganggctaaaagaatgggatttaanttaatgnaaaatgattatgcntttgtcccaaaaggcggattcagtttaaaacaagctgttgcccaaaatggttncaacatggncgtacnttatgtttgaaggaaantcacagaacnttcccatccaaacnttngattnaattgataatcccacgaatgggtttaccgaggccaagattttatgttggaaatggagcgtgcgnactggatcaaaaccntagccacnattaaagga

SEQ ID NO: 784 - DNA, 226 bp, Homo sapiens
  misc feature (20): n equals a,t,g, or c
  misc feature (208): n equals a,t,g, or c
ggccggggacggtgtgagancggtaagatggcggcggcggcggtggtggagttccagagagcccagtctctactcagcaccgaccgggaggcctccatcgacatcctccactccatcgtgaagcgtgacattcaggaaaacgatgaagaggcagtgcaagtcaaagagcagagcatcctggaactgggatctctcctggcaaagactngacaagctgcagagctta

SEQ ID NO: 785 - DNA, 356 bp, Homo sapiens
  misc feature (6): n equals a,t,g, or c
  misc feature (176): n equals a,t,g, or c
  misc feature (180): n equals a,t,g, or c
  misc feature (251): n equals a,t,g, or c
  misc feature (254): n equals a,t,g, or c
  misc feature (303): n equals a,t,g, or c
  misc feature (307): n equals a,t,g, or c
  misc feature (330): n equals a,t,g, or c
  misc feature (341): n equals a,t,g, or c
  misc feature (348): n equals a,t,g, or c
ccgggntcccgccaccaccgcgcgcgggacagattgattcactttggagctgtaagtactgatgtattagggtgcagcgctcattgttccttgacgcagagtcccaaaatgaatatccaagagcagggtttccccttggacctcggagcaagtttcaccgaagatgctcccccgancccnagtgcctggtgaggagggagaactggtgtccacagacccgaggcccgccagctacagtttctgctccgggnaangtgttggcattaaaggtgagacttcgacggccactccgaagcgctcggntctngacctggggtatgagcctgaggnagtgcttcccnaacccancataattt

SEQ ID NO: 786 - DNA, 512 bp, Homo sapiens
  misc feature (32): n equals a,t,g, or c
  misc feature (58): n equals a,t,g, or c
  misc feature (179): n equals a,t,g, or c
  misc feature (267): n equals a,t,g, or c
  misc feature (307): n equals a,t,g, or c
  misc feature (308): n equals a,t,g, or c
  misc feature (316): n equals a,t,g, or c
  misc feature (318): n equals a,t,g, or c
  misc feature (338): n equals a,t,g, or c
  misc feature (344): n equals a,t,g, or c
  misc feature (348): n equals a,t,g, or c
  misc feature (349): n equals a,t,g, or c
  misc feature (354): n equals a,t,g, or c
  misc feature (385): n equals a,t,g, or c
  misc feature (420): n equals a,t,g, or c
  misc feature (458): n equals a,t,g, or c
  misc feature (469): n equals a,t,g, or c
  misc feature (486): n equals a,t,g, or c
  misc feature (508): n equals a,t,g, or c
ggcagagcctgacggcagccacccggtggtgntggcgccctacaacggcgggccggcnggcacgtgccccaagatcaagcaggaggcggtctcttcgtgcacccacttgggcgctggaccccctctgcagcaatggccaccggcgggctgccacacggacttccccctggggacggcanttccccagcaggacttaccccggaccctgggtcttgagggaagtgctgagcagcaggggactgttcaccctgccctgccggtttcctnccgggtttccatccccacccgggggcccaatttacccatnnctttcctngnccccattcagatgcagccgnaagttnccgnncgttncattaaccaaggggtttatgccaaccggttnctggatgccaaaggaggcccaagtcaaaggggggnaaggaggttgtgggccccggaaaaggaccggcaaccanattttgattanggggtttgggaaaaacnttcaaaaaaggggttttcccantttt

SEQ ID NO: 787 - DNA, 339 bp, Homo sapiens
  misc feature (248): n equals a,t,g, or c
  misc feature (292): n equals a,t,g, or c
  misc feature (293): n equals a,t,g, or c
  misc feature (294): n equals a,t,g, or c
  misc feature (332): n equals a,t,g, or c
gctgcgcgcccgcggagcggcctgggccggcggcctcctgcatcgggcggccccctgcagcctcctgcccaggctccggacatggacatcttccagcaacagatctcgagaagacagctggctaaaatccttatttgtccggaaagttgatccaagaaaagatgcccactccaatctcctatccaaaaaggaaacaagcaatctatacaaattacagtttcacaatgttaaaccggaatgcctagaancatacaacaaaatttgtcaagaggtgttgccaaagattcacgannnataaacactacccttgtactttggttgggggacttggnaacacgt

SEQ ID NO: 788 - DNA, 405 bp, Homo sapiens
  misc feature (355): n equals a,t,g, or c
  misc feature (386): n equals a,t,g, or c
  misc feature (388): n equals a,t,g, or c
  misc feature (392): n equals a,t,g, or c
  misc feature (397): n equals a,t,g, or c
gcggcagccttttcccgcgcgtgctgccttcgccgctcgggccgcccgggggaaaacatggcgtctgccctggagcagttcgtgaacagtgtccgacagctctcagctcaaggtttgtgaagttttctatgcccagtgttcctgacttcgaaacgctattctcacaggttcagctcttcatcagcacttgtaatggggagcacattcgatatgcaacagacacttttgctgggctttgccatcagctaacaaatgcacttgtggaaagaaaacagcccctgcgaggaattggcatccttaagcaagccatagacaagatgcagatgaatacaaaccagctgacctcaatacatgntgatctctgccagcttgtttgctagcaaaangncttnagctngcccttca

SEQ ID NO: 789 - DNA, 518 bp, Homo sapiens
  misc feature (380): n equals a,t,g, or c
  misc feature (413): n equals a,t,g, or c
  misc feature (450): n equals a,t,g, or c
  misc feature (461): n equals a,t,g, or c
  misc feature (479): n equals a,t,g, or c
  misc feature (501): n equals a,t,g, or c
  misc feature (515): n equals a,t,g, or c
tgcgccaagctctaatacgactcactatagggaaagctggtacgcctgcaggtaccggtccgggaattcccgggtcgacccacgcgtccgcttcctgccgtcgcgtttgcacctcgctgctccacctctggggcgcattccaaccttccagcctgcgacctgcggagaaaaaaaattacttattttcttgccccatacataccttgaggcgagcaaaaaaattaaattttaaccatgagggaaatcgtgcacatccaggctggtcagtgtggcaaccagatcggtgccaagttctgggaggtgatcagtgatgaacatgggcatcgaccccaccgggcacctaccacgggggacagcgacctgccagctgggaccgcatnttctgtgtactgacaatggaagccacaggtggnaaatgatgtttcctcgtggccatcctggtgggatctnagaacctgggnaccatggaatctggttgngttcaggtcccttttgggccantgttttagaccagngaa

SEQ ID NO: 790 - DNA, 386 bp, Homo sapiens
cgcgaatcgcagcttctgagaccagggttgctccgtccgtgctccgcctcgccatgacttcctacagctatcgccagtcgtcggccacgtcgtccttcggaggcctgggcggcggctccgtgcgttttgggccgggggtcgcttttcgcgcgcccagcattcacgggggctccggcggccgcggcgtatccgtgtcctccgcccgctttgtgtcctcgtcctcctcggggggctacggcggcggctacggcggcgtcctgaccgcgtccgacgggctgctggcgggcaacgagaagctaaccatgcagaacctcaacgaccgcctggcctcctacctggacaaggtgcgcgccctggaagcggccaacggcgagctagaggtgaaa

SEQ ID NO: 791 - DNA, 470 bp, Homo sapiens
  misc feature (112): n equals a,t,g, or c
  misc feature (324): n equals a,t,g, or c
  misc feature (402): n equals a,t,g, or c
  misc feature (428): n equals a,t,g, or c
tcgacccacgcgtccgcccacgcgtccgagtggtctgaggaacagctgattgctgcaaaattttgctttgctggacttcttataggccagactgaagtggatatcatgagtnatgctacacaggctatatttgaaatactggagaaatcctggttgccccagaattgtacactggttgatatgaagattgaatttggtgttgatgtaaccaccaaagaaattgttcttgctgatgttattgacaatgattcctggagactctggccatcaggagatcgaagccaacagaaagacaaacagtcttatcgggacctcaaagaagtnactcctgaagggctccaaatggtaaagagaaactttgagtgggttgcagagagagtagagttgcttttgaaatcaganagtcagtgcagggttgtagtgttgangggctctacttctgatcttggtcactgtgaaaaaatccagga

SEQ ID NO: 792 - DNA, 428 bp, Homo sapiens
  misc feature (87): n equals a,t,g, or c
  misc feature (204): n equals a,t,g, or c
  misc feature (207): n equals a,t,g, or c
  misc feature (228): n equals a,t,g, or c
  misc feature (233): n equals a,t,g, or c
  misc feature (239): n equals a,t,g, or c
  misc feature (271): n equals a,t,g, or c
  misc feature (277): n equals a,t,g, or c
  misc feature (280): n equals a,t,g, or c
  misc feature (311): n equals a,t,g, or c
  misc feature (320): n equals a,t,g, or c
  misc feature (375): n equals a,t,g, or c
  misc feature (391): n equals a,t,g, or c
  misc feature (421): n equals a,t,g, or c
  misc feature (422): n equals a,t,g, or c
gtggacatccgcaaagacctgtacgccaacacggtgctgtcgggcggcaccaccatgtatccgggcattgctgacaggatgcagaangagatcaccgccctggcgcccagcaccatgaagatcaagatcatcgcacccccagagcgcaagtactcggtgtggatcggtggctccatcctggcctcactgtccaccttccagcanatntggattacaagcaggagtacnacaantcgggnccctccatcgtccaccgcaaatgcttctaacngactcncanatgcttaccattgctgcatgggttaattaanaataaaaantttgcccctggcaaatgcacacacctcatgcttacctccccaaaattggaataanccttccaaaaaaaaantgttccttaaaacttgttttcttaatttcnnccttgg

SEQ ID NO: 793 - DNA, 526 bp, Homo sapiens
  misc feature (55): n equals a,t,g, or c
  misc feature (170): n equals a,t,g, or c
  misc feature (303): n equals a,t,g, or c
  misc feature (327): n equals a,t,g, or c
  misc feature (329): n equals a,t,g, or c
  misc feature (334): n equals a,t,g, or c
  misc feature (352): n equals a,t,g, or c
  misc feature (361): n equals a,t,g, or c
  misc feature (374): n equals a,t,g, or c
  misc feature (377): n equals a,t,g, or c
  misc feature (381): n equals a,t,g, or c
  misc feature (394): n equals a,t,g, or c
  misc feature (398): n equals a,t,g, or c
  misc feature (420): n equals a,t,g, or c
  misc feature (451): n equals a,t,g, or c
  misc feature (467): n equals a,t,g, or c
  misc feature (476): n equals a,t,g, or c
  misc feature (509): n equals a,t,g, or c
  misc feature (522): n equals a,t,g, or c
tgcgagaagacgacagaaggggcccgcagcgccggagtcaaagccggttcccgcncagtcccgtcctgcagcagtctgcctcctctttcaacatgacagatgccgctgtgtccttcgccaaggacttcctggcaggtggagtggccgcagccatctcaagacggcggtangcccatcgagcgggtcaagctgctgctgcagttgcaatgccagcaagcagatcactgcagataagcaatgcaaaggcattatagactgcgtggtccgtattcccaaggagcaggattctgtccttctggcgcngtaactggccatgtcatcagatantncccanccaggttcttaatttcgnctttcaagnttaatacaagcanatnttcnggggtggtgtggnacangagaacccattttggggctaanttgcagggaatttgggcatcgggtggttccncgggggccaaattccngggttttgngtaacccctggaatttgcccgtaaccgtttaanattgatttggggnaaaa

SEQ ID NO: 794 - DNA, 458 bp, Homo sapiens
  misc feature (302): n equals a,t,g, or c
  misc feature (377): n equals a,t,g, or c
  misc feature (398): n equals a,t,g, or c
  misc feature (427): n equals a,t,g, or c
  misc feature (434): n equals a,t,g, or c
  misc feature (443): n equals a,t,g, or c
ggcacgagtgcacctggagctccaggaggcaagggtgatgctggtgcccctggtgaacgtggacctcctggattggcaggggccccaggacttagaggtggaactggtccccctggtcccgaaggaggaaagggtgctgctggtcctcctgggccacctggtgctgctggtactcctggtctgcaaggaatgcctggagaaagaggaggtcttggaagtcctggtccaaagggtgacaagggtgaaccaggcggtccaggtgctgatggtgtcccagggaaagatggcccaaggggtcctantggtcctattggtcctcctggcccagttggccagcctggagataaagggtgaaggtggtgcccccggatttccangtataagttggacctgtggtnagcctggtgagagaggtgaaatggccttncaggacngttggtttncctggtgttcctgga

SEQ ID NO: 795 - DNA, 497 bp, Homo sapiens
  misc feature (10): n equals a,t,g, or c
  misc feature (14): n equals a,t,g, or c
  misc feature (182): n equals a,t,g, or c
  misc feature (234): n equals a,t,g, or c
  misc feature (238): n equals a,t,g, or c
  misc feature (312): n equals a,t,g, or c
  misc feature (328): n equals a,t,g, or c
  misc feature (356): n equals a,t,g, or c
  misc feature (361): n equals a,t,g, or c
  misc feature (368): n equals a,t,g, or c
  misc feature (369): n equals a,t,g, or c
  misc feature (375): n equals a,t,g, or c
  misc feature (383): n equals a,t,g, or c
  misc feature (394): n equals a,t,g, or c
  misc feature (397): n equals a,t,g, or c
  misc feature (411): n equals a,t,g, or c
  misc feature (416): n equals a,t,g, or c
  misc feature (437): n equals a,t,g, or c
  misc feature (439): n equals a,t,g, or c
  misc feature (442): n equals a,t,g, or c
  misc feature (467): n equals a,t,g, or c
  misc feature (471): n equals a,t,g, or c
  misc feature (474): n equals a,t,g, or c
  misc feature (478): n equals a,t,g, or c
  misc feature (480): n equals a,t,g, or c
  misc feature (485): n equals a,t,g, or c
  misc feature (492): n equals a,t,g, or c
aattcggcanaggnctaagggagctgacggagagggccaccgcccagcaatagacggtgtctcagcctgccgagccgcagtttccgtggtgtgagtaagtccgggcccgtgtcccctctcccgccgccgccatgggctgcacgttgagcgccgaagacaaggcggcagtggagcgatgaagnatgatcgaccgcaacttacgggaggacggggaaaaagcggccaaagaagtgnaagntgctgctacttcggtgctggagaatctggttaaaagcaccatttgtgagacagatgaaaatcatttcatgaggntgggtattcagaggtngaatgttaaacaatattaaagttagttnttttncagcatnnttgttncagtgccntcattgcaatnttnagtggccttgggangggtnaaaaaattgattttggggaantntcncagggcaattgttgcccggcaattntttnttntagntngtcanttttttngaggg

SEQ ID NO: 796 - DNA, 497 bp, Homo sapiens
  misc feature (304): n equals a,t,g, or c
  misc feature (330): n equals a,t,g, or c
  misc feature (334): n equals a,t,g, or c
  misc feature (336): n equals a,t,g, or c
  misc feature (357): n equals a,t,g, or c
  misc feature (385): n equals a,t,g, or c
  misc feature (396): n equals a,t,g, or c
  misc feature (408): n equals a,t,g, or c
  misc feature (410): n equals a,t,g, or c
  misc feature (429): n equals a,t,g, or c
  misc feature (442): n equals a,t,g, or c
  misc feature (460): n equals a,t,g, or c
  misc feature (485): n equals a,t,g, or c
ggcacgaggtgtcggcggcttccctggtcccggcggtcccccagcccgaggcggacaacctgacgctgcggtaccggtccctggtgtaccagctgaactttgatcagaccctgaggaatgtagataaggctggcacctgggccccccgggagctggtgctggtggtccaggtgcataaccggcccgaatacctcagactgctgctggactcacttcgaaaagcccagggaattgacaacgtcctcgtcatctttagccatgattctggtcgaccgagatcaatcagttgatcgccggggttganttctgttccggttttgcaggtgtttntttncntttcaagcattcaattgttancctaacgagttttccagtaagtggaccncagaggatttntcccagagaacntnccgaagaatgccctttttnaaattgggggcancaaattgaggtttcccgntttttgggcatttaaggggggggcnaatttttccagg

SEQ ID NO: 797 - DNA, 589 bp, Homo sapiens
  misc feature (241): n equals a,t,g, or c
  misc feature (423): n equals a,t,g, or c
  misc feature (475): n equals a,t,g, or c
  misc feature (485): n equals a,t,g, or c
  misc feature (493): n equals a,t,g, or c
  misc feature (495): n equals a,t,g, or c
  misc feature (536): n equals a,t,g, or c
  misc feature (538): n equals a,t,g, or c
  misc feature (580): n equals a,t,g, or c
actagttctagatcgcgagcggccgctctagaggatccaagcttacgtacgcgtgcatgcgacgtcatagctcttctatagagtcacctaaattcaattcactggccgtcgttttacaacgtcgtgactgggaaaaccctggcgttacccaacttaatcgccttgcagcacatccccctttcgccagctggcgtaatagcgaagaggcccgcaccgatcgcccttcccaacagttgcgcanctgaatggcgaatgggacgcgccctgtagcggcgcattaagcgcggcgggtgtggtggttacgcgcagtgaaccgctacacttgccagcgccctagcgcccgctcctttcgctttcttcccttcctttctcgccacgttcgccggctttccccgtcaagctctaaatcgggggctcctttanggttccgatttagtgctttacgggcacctcgaccccaaaaaaacttgattangggtaatggntcacgtantngggccatcgccctgatagacggtttttcgcctttgacgttngngtccacgttcttaataagtgggatcttgttcaaaactggaanaacactcaa

SEQ ID NO: 798 - DNA, 169 bp, Homo sapiens
  misc feature (9): n equals a,t,g, or c
  misc feature (23): n equals a,t,g, or c
  misc feature (28): n equals a,t,g, or c
  misc feature (42): n equals a,t,g, or c
  misc feature (77): n equals a,t,g, or c
  misc feature (162): n equals a,t,g, or c
  misc feature (165): n equals a,t,g, or c
  misc feature (168): n equals a,t,g, or c
  misc feature (169): n equals a,t,g, or c
ctctaatanatcatataggaagnggtanctgcagtacggtcngaattcccggctctagagatccaagcttacgtacngcgcatgcacgtcatagctcttctatagtgtcacctaaattcaattcactggccgtcgttttacaacgtcgtgactgggaaaacnctntgnn

SEQ ID NO: 799 - DNA, 112 bp, Homo sapiens
  misc feature (24): n equals a,t,g, or c
  misc feature (25): n equals a,t,g, or c
  misc feature (103): n equals a,t,g, or c
  misc feature (110): n equals a,t,g, or c
  misc feature (111): n equals a,t,g, or c
ctctagaggatccaagcttacgtnngcgtgcatgcgacgtcatagctcttctatagtgtcagctaaattcaattcactggccgtcgttttacaacgtcgtgantgggaannc

SEQ ID NO: 800 - DNA, 424 bp, Homo sapiens
  misc feature (372): n equals a,t,g, or c
  misc feature (373): n equals a,t,g, or c
  misc feature (391): n equals a,t,g, or c
  misc feature (395): n equals a,t,g, or c
  misc feature (416): n equals a,t,g, or c
gttgactgagacacgcttcaaaactggaactactctgaaatacacctgcctccctggctacgtcagatcccattcaactcagacgcttacctgtaattctgatggcgaatgggtgtataacaccttctgtatctacaaacgatgcagacacccaggagagttacgtaatgggcaagtagagattaagacagatttatcttttggatcacaaatagaattcagctgttcagaaggatttttcttaattggctcaaccactagtcgttgtgaagtccaagatagaggagttggctggagtcatcctctcccacaatgtgaaattgtccaagtgtaagcctcctccagacatcaggaatgggaaggcacagcggnngaagaaaatttctacgcntaanggggtttctgtcacctaaagntgggaccc

SEQ ID NO: 801 - DNA, 249 bp, Homo sapiens
  misc feature (36): n equals a,t,g, or c
  misc feature (63): n equals a,t,g, or c
  misc feature (74): n equals a,t,g, or c
  misc feature (101): n equals a,t,g, or c
  misc feature (113): n equals a,t,g, or c
  misc feature (122): n equals a,t,g, or c
  misc feature (149): n equals a,t,g, or c
  misc feature (157): n equals a,t,g, or c
  misc feature (171): n equals a,t,g, or c
  misc feature (179): n equals a,t,g, or c
  misc feature (205): n equals a,t,g, or c
  misc feature (242): n equals a,t,g, or c
ggcaggtccacctggaccaggtggaggtggccagcnggctgaccctgtgcaaggagggctgtnaggccattgtngacacaggcacttccctcatggtgggnccggtggatgangtgcgcgantgcagaaggccatcggggccgtgccgntgattcanggcgagtacatgancccctgtnagaaggtgtccaccctgcccgcaatnacactgaagctgggaggcaaaggctacaagctgtccncagagga

SEQ ID NO: 802 - DNA, 402 bp, Homo sapiens
  misc feature (147): n equals a,t,g, or c
  misc feature (149): n equals a,t,g, or c
  misc feature (310): n equals a,t,g, or c
  misc feature (322): n equals a,t,g, or c
  misc feature (344): n equals a,t,g, or c
  misc feature (363): n equals a,t,g, or c
  misc feature (383): n equals a,t,g, or c
acccacgcgtccgcccacgcgtcccggacgcgtgggtcgacccagctttctagggccctagaaactctgacaggtgccttattccagcgacccccacttattgctgcagtaaagaggcagctccgagtgaggaccatctacgagagnanaaatgattgaatacgatcctgaaagaagattaggaatcttttgggtgagttgtgaggctggcacctacattcggacattatgtgtgcaccttggtttgttattgggagttggtggtcagatgcaggagcttcggagggttcgttctggagtcatgagtganaaggaccacatngtgacaatgcatgatgtgcttnatgctcagtggctgtatgntaaccacaaggatgagagtnacctgcggggagttgttta

SEQ ID NO: 803 - DNA, 542 bp, Homo sapiens
  misc feature (122): n equals a,t,g, or c
  misc feature (124): n equals a,t,g, or c
  misc feature (194): n equals a,t,g, or c
  misc feature (215): n equals a,t,g, or c
  misc feature (262): n equals a,t,g, or c
  misc feature (355): n equals a,t,g, or c
  misc feature (374): n equals a,t,g, or c
  misc feature (380): n equals a,t,g, or c
  misc feature (386): n equals a,t,g, or c
  misc feature (400): n equals a,t,g, or c
  misc feature (403): n equals a,t,g, or c
  misc feature (406): n equals a,t,g, or c
  misc feature (425): n equals a,t,g, or c
  misc feature (488): n equals a,t,g, or c
  misc feature (500): n equals a,t,g, or c
  misc feature (501): n equals a,t,g, or c
  misc feature (507): n equals a,t,g, or c
  misc feature (527): n equals a,t,g, or c
ggcacagcttccgctttacccgtctccctcctggcgcttgtcctcctctcccagtcggcaccacagcggtggctgccgggcgtggtgtcggtgggtcggttggtttttgtctcaccgttggntnccgtgccgttcagttgcccgccatggctgagctggatccgttcggcgcccctgccggcgcccctggggtncccgcgctggggaacggatgnccggcgccggcgaagaagacccggctgcggccttcttggcgcaaagnagaagcgagattgcgggcatcgagaacgacgaggccttcgccatcctggaacggcggcgcccccgggccccaaccgcaaggaaagtccggcgnggggttccgatgctgttgnatggantaatgnaatggtggattatnacnagnaaattaatggttccaacanaaattatgcagtatttcaaaatggatcgattgcatcaaaacctgaaatatcctaaatggaganagaaaatggaannttgaanccttaagccaatttcggaancaaaaacaaatggaa

SEQ ID NO: 804 - DNA, 422 bp, Homo sapiens
  misc feature (4): n equals a,t,g, or c
  misc feature (65): n equals a,t,g, or c
  misc feature (66): n equals a,t,g, or c
  misc feature (67): n equals a,t,g, or c
  misc feature (70): n equals a,t,g, or c
  misc feature (71): n equals a,t,g, or c
  misc feature (116): n equals a,t,g, or c
  misc feature (228): n equals a,t,g, or c
  misc feature (229): n equals a,t,g, or c
  misc feature (262): n equals a,t,g, or c
  misc feature (303): n equals a,t,g, or c
  misc feature (363): n equals a,t,g, or c
agangaccggcagcctgtacctgggcagcagatgaccctgaagatagagggtgaccacggggacnnnccnngtactggtggccgtggacaagggcgtgttcgtgctgaataagaanaacaaactgacgcagagtaagatctgggacgtggtggagaaggcagacatcggctgcaccccgggcagtgggaaggattacgccggtgtcttctccgacgcagggctgaccnncacgagcagcagtggccagcagaccgcccaganggcagaacttcagtgcccgcagccagccgcccgccgacgcngttccgtgcagctcacggagaagcgaatggacaaagtcggcaagtaccccaaggagctgngcaagtgctgcgaggacggcattcgggagaaccccatgaagttctcgtgccagggcggg

SEQ ID NO: 805 - DNA, 566 bp, Homo sapiens
  misc feature (342): n equals a,t,g, or c
  misc feature (359): n equals a,t,g, or c
  misc feature (519): n equals a,t,g, or c
cgagctgaccctgatcagggccgagttgtctcggcggcgctgccgaggcctccacccggggagggtggttaccgctgaggagctgcagtctctgtcaagatgatagaggtactgacaacaactgactctcagaaactgctacaccagctgaatgccctgttggaacaggagtctagatgtcagccaaaggtctgtggtttgagactaattgagtctgcacacgataatggcctcagaatgactgcaagactaagggactttgaagtaaaagatcttcttagtctaactcagttcttggcttgacacagagacatttctctagctgtgaattactggacagantcctgtctaaaatgaangtacagcccaagcacctgggtgtgttggactgagctgcttttatttggctgtaaaatcaatagaagaggaaaaggatgtcccattggcaactgacttgatccgaataagtcaatataaggttacgggttcagactgatgagaatgggaaaaattgtattngagaaggtgtgtttggaagtcaagctactaatgcctttcaattctgc

SEQ ID NO: 806 - DNA, 438 bp, Homo sapiens
  misc feature (383): n equals a,t,g, or c
  misc feature (428): n equals a,t,g, or c
  misc feature (437): n equals a,t,g, or c
cccagtcctagctgctggcatcactatactactaacagaccgcaacctcaacaccaccttcttcgaccccgccggaggaggagaccccattctataccaacacctattctgatttttcggtcaccctgaagtttatattcttatcctaccaggcttcggaataatctcccatattgtaacttactactccggaaaaaaagaaccatttggatacataggtatggtctgagctatgatatcaattggcttcctagggtttatcgtgtgagcacaccatatatttacagtaggaatagacgtagacacacgagcatatttcacctccgctaccataatcatcgcttatccccaccggcgtcaaagtattagctgactcgccacanttccacgggagcaatatgaaatgatctggctgcagtgctctgagncctaaggant

SEQ ID NO: 807 - DNA, 236 bp, Homo sapiens
  misc feature (122): n equals a,t,g, or c
  misc feature (140): n equals a,t,g, or c
  misc feature (215): n equals a,t,g, or c
  misc feature (219): n equals a,t,g, or c
  misc feature (228): n equals a,t,g, or c
  misc feature (231): n equals a,t,g, or c
ctcgtgccgaattcggcacgagaaactttcctcactatctgcttcatccgccaactaatatttcactttacatccaaacatcactttggcttcgaagccgccgcctgatactggcattttgnacatgtggtttgactatntccgtatgtctccatctattgatgagggtcttaaaaaaaaaaaaaaaaaaaaaaaaaaaaaaaaaaaaaaaaaancccnggggggggnccnggacc

SEQ ID NO: 808 - DNA, 552 bp, Homo sapiens
  misc feature (375): n equals a,t,g, or c
  misc feature (399): n equals a,t,g, or c
  misc feature (405): n equals a,t,g, or c
  misc feature (447): n equals a,t,g, or c
  misc feature (473): n equals a,t,g, or c
  misc feature (503): n equals a,t,g, or c
  misc feature (512): n equals a,t,g, or c
  misc feature (516): n equals a,t,g, or c
  misc feature (543): n equals a,t,g, or c
ggcacgagtggagaaccgggcccagcagcactggggcagtggagtgggagtgaagaagctgtgtgaactgcagcctgaggagaagtgctgtgtggtgggcactctgttcaaggccatgccgctgcagccctccatcctgcgggaggtcagcgaggagcacaacctgctcccccagcctcctcggagtaaatacatacacccagatgacgagctggtcttggaagatgaactgcagcgtatcaaactaaaaggcaccattgacgtgtcaaagctggttacggggactgtcctggctgtgtttggctccgtgagagacgacgggaagtttctggtggaggattattgctttgttgaccttgctccccagaagcccgnacccccattgacacagttaggttntgttantggtgtccggcctgggcctgggtggcgttggaggcgagagcntgttgggcacccattgttggtggatntggtgacggggcagtttggggacgaagggnagcatgcancgcngccaagtttcccggttatcctggttgnaacttctaa

SEQ ID NO: 809 - DNA, 380 bp, Homo sapiens
  misc feature (349): n equals a,t,g, or c
  misc feature (359): n equals a,t,g, or c
  misc feature (362): n equals a,t,g, or c
  misc feature (365): n equals a,t,g, or c
  misc feature (380): n equals a,t,g, or c
ggcacgaggctgaggcggcgccagttggccgggcacggggctgctgtaaggccgaggttgcggcggaagcggagaccatgttccgagcggcggctccggggcagctccggcgggcggcctcattgctacgatttcagagtaccctggtaatagctgagcatgcaaatgattccctagcacccattactttaaataccattactgcagccacacgccttggaggtgaagtgtcctgcttagtagctggaaccaaatgtgacaaggtggcacaagatctctgtaaagtagcaggcatagcaaaaagttctggtggctcagcatgaatgtgtacaagggcttacttccaganggaactgaanacnatnatttttggaaactcn

SEQ ID NO: 810 - DNA, 416 bp, Homo sapiens
  misc feature (352): n equals a,t,g, or c
  misc feature (384): n equals a,t,g, or c
  misc feature (401): n equals a,t,g, or c
  misc feature (406): n equals a,t,g, or c
  misc feature (407): n equals a,t,g, or c
aagaaagtagaggacatgatgaagaagctgtggggtgacggcccagaagtaccgctgcgagctcctgtacgaggggcccccggacgacgaggctgccatgggcattaaaagctgtgaccccaaaggccctcttatgatgtatatttccaaaatggtgccaacctccgacaaaggtcggttctacgcctttggacgagtcttctcggggctggtctccactggcctgaaggtcaggatcatggggcccaactatacccctgggaagaaggaggacctctacctgaagccaatccagagaacaatcttgatgatgggccgctaagtggaagcccatcgaaggatgtgccttgtngggacattttgggcctcgtggcgttggaccantccttgtgaaaacgggnaccannaacaacttc

SEQ ID NO: 811 - DNA, 748 bp, Homo sapiens
  misc feature (543): n equals a,t,g, or c
  misc feature (619): n equals a,t,g, or c
  misc feature (668): n equals a,t,g, or c
  misc feature (671): n equals a,t,g, or c
  misc feature (714): n equals a,t,g, or c
gccgcccagccacgcctcatggagcccatctaccttgtggagatccagtgtccagagcaggtggtcggtggcatctacggggttttgaacaggaagcggggccacgtgttcgaggagtcccaggtggccggcacccccatgtttgtggtcaaggcctatctgcccgtcaacgagtcctttggcttcaccgctgacctgaggtccaacacgggcggccaggcgttcccccagtgtgtgtttgaccactggcagatcctgcccggagaccccttcgacaacagcagccgccccagccaggtggtggcggagacccgcaagcgcaagggcctgaaagaaggcatccctgccctggacaacttcctggacaaattgtaggcggcccttcctgcagcgcctgccgccccggggactcgcagcacccacagcaccacgtcctcgaattctcagacgacacctggagactgtcccgacacagcgacgctcccctgagaggtttctggggcccgctgcgtgccatcactcaaccataacacttgatgccgnttctttcaatatttatttccagagtccggaggcagcagacacgccctcttagtagggacttaatgggccggtcggngagggggaggcgggatgggacacccaacacttttttcatttcttcaganggnaaacttcagatgtccaaactaattttaacaaacgcattaaganggttaatttgggtacaatgggcccgaatggcttt

SEQ ID NO: 812 - DNA, 562 bp, Homo sapiens
  misc feature (4): n equals a,t,g, or c
  misc feature (5): n equals a,t,g, or c
  misc feature (8): n equals a,t,g, or c
aagnnganacaaccctcactaaagggaacaaaagctggagctccaccgcggtgcggccgctctagaactagtggatcccccgggctgcaggaattcggcacgagcacaatttgcgcgctctctttctgctgctccccagctctcggatacagccgacaccatgggtttcggagacctgaaaagccctgccggcctccaggtgctcaacgattacctggcggacaagagctacatcgaggggtatgtgccatcacaagcagatgtggcagtatttgaagccgtgtccagcccaccgcctgccgacttgtgtcatgccctacgttggtataatcacatcaagtcttacgaaaaggaaaaggccagcctgccaggagtgaagaaagctttgggcaaatatggtcctgccgatgtggaagacactacaggaagtggagctacagatagtaaagatgatgatgacattgacctctttggatctgatgatgaggaggaaagtgaagaagcaaagaggctaagggaagaacgtcttgcacaatatgaatcaaagaaagccaaaaaacct

SEQ ID NO: 813 - DNA, 415 bp, Homo sapiens
  misc feature (10): n equals a,t,g, or c
  misc feature (15): n equals a,t,g, or c
  misc feature (20): n equals a,t,g, or c
  misc feature (27): n equals a,t,g, or c
  misc feature (42): n equals a,t,g, or c
  misc feature (48): n equals a,t,g, or c
  misc feature (50): n equals a,t,g, or c
  misc feature (53): n equals a,t,g, or c
  misc feature (69): n equals a,t,g, or c
gaaaataagngatgntcgangtgaaanaccatactaaagggncaaaantngantcaccgcggtgcggcngtctagactagtggatcccccgggctgcaggaattggcacgaggttagtttctgcgacttgtgttgggactggaagatgtcttcaggaaatgctaaaattgggcaccctgcccccaacttcaaagccacagctgttatgccagatggtcagtttaaagatatcagcctgtctgactacaaaggaaaatatgttgtgttcttcttttaccctcttgacttcacctttgtgtgccccacggagatcattgctttcagtgatagggcagaagaatttaagaaactcaactgccaagtgattggtgcttctgtggattctcacttctgtcatctagcatgggtcaataca

SEQ ID NO: 814 - DNA, 316 bp, Homo sapiens
  misc feature (15): n equals a,t,g, or c
  misc feature (21): n equals a,t,g, or c
  misc feature (35): n equals a,t,g, or c
  misc feature (85): n equals a,t,g, or c
  misc feature (93): n equals a,t,g, or c
  misc feature (110): n equals a,t,g, or c
  misc feature (111): n equals a,t,g, or c
  misc feature (118): n equals a,t,g, or c
  misc feature (121): n equals a,t,g, or c
  misc feature (154): n equals a,t,g, or c
  misc feature (177): n equals a,t,g, or c
  misc feature (186): n equals a,t,g, or c
  misc feature (195): n equals a,t,g, or c
  misc feature (210): n equals a,t,g, or c
  misc feature (245): n equals a,t,g, or c
  misc feature (247): n equals a,t,g, or c
  misc feature (280): n equals a,t,g, or c
  misc feature (304): n equals a,t,g, or c
  misc feature (314): n equals a,t,g, or c
aaagggacaaaagcnggagcnccaccgcggggcgnccgctctagaactagtggatcccccgggctgcaggaattcggcacagctntgggggantcctggtgcacccccanngggtctnctntgctgcccattgcctaaagaagaatagccaggnctggctgggtcggcacaacctgnttgagcctnaagacacangccagagggtccctntcagccacagcttcccacacccgctctgacaatantnagcctttctgaagcatcaaagccttagaccagntgaagactccagccatgacctcangctgctccgnct

SEQ ID NO: 815 - DNA, 507 bp, Homo sapiens
  misc feature (9): n equals a,t,g, or c
  misc feature (265): n equals a,t,g, or c
  misc feature (279): n equals a,t,g, or c
  misc feature (309): n equals a,t,g, or c
  misc feature (336): n equals a,t,g, or c
  misc feature (349): n equals a,t,g, or c
  misc feature (358): n equals a,t,g, or c
  misc feature (385): n equals a,t,g, or c
  misc feature (399): n equals a,t,g, or c
  misc feature (437): n equals a,t,g, or c
  misc feature (466): n equals a,t,g, or c
  misc feature (486): n equals a,t,g, or c
  misc feature (506): n equals a,t,g, or c
  misc feature (507): n equals a,t,g, or c
ggcacagcncgcatgggctgcggggccgcgcgagctcgcctccgtcctctgcctccgcagaacgccgcgatggctgcgcagggagagccccaggtccagttcaaagtaggtaaccctgcgggcgggaggcggccgagcccgaccgcgtgcgactcgcgggtccctcctcctggggccacgatggctgtaatggggccccgcatccacattctttgttttaagtgagcctgtggtggttaaagttccgtgactctgggatcttganaggtgaatgtttanggtttacttccaaaatgtgtttttcaacancttgtaatggttggtgatggtggtaangggaaaaacgacntcgtggaantgcatttgactggtggaatttgagaanaatgtgttagccancttgggtgttggaggttcaacccccaatgtttccacancaacagaggacccattaagttcaatgtantgggacacagccggccaggngaattccgtggactggaaann

SEQ ID NO: 816 - DNA, 551 bp, Homo sapiens
  misc feature (2): n equals a,t,g, or c
  misc feature (15): n equals a,t,g, or c
cnagtgtagacagcnaaccctcactaaagggaacaaaagctggagctccaccgcggtgcggccgctctagaactagtggatcccccgggctgcaggaattcggcacgagcaggcatgcagaaggctgacgtctatagctttgggatcatcctgcaggagatagcacttcgcagtggtcctttctacttggagggcctggacctcagccccaaagagattgtccagaaggtacgaaatggtcagcggccatatttccggccaagcattgaccggacccaactgaatgaagagctagttttgctgatggagcgatgttgggctcaggacccagctgagcggccagactttggacagattaagggcttcattcggcgctttaacaaggagggtggcaccagcatattggacaacctcctgctgcgcatggaacagtatgccaataacttggagaagctggtggaggaacgcacacaggcctatctggaggaaaaacgcaaggctgaagctctgctctaccaaatcctaccccattcagtggcagagcagttaaa

SEQ ID NO: 817 - DNA, 386 bp, Homo sapiens
  misc feature (11): n equals a,t,g, or c
  misc feature (16): n equals a,t,g, or c
  misc feature (17): n equals a,t,g, or c
  misc feature (372): n equals a,t,g, or c
  misc feature (377): n equals a,t,g, or c
  misc feature (378): n equals a,t,g, or c
  misc feature (379): n equals a,t,g, or c
  misc feature (384): n equals a,t,g, or c
gggagacattnaagannttcaaggatcccaatgcacccaagaggcctccttcggccttcttcctcttctgctctgagtatcgcccaaaaatcaaaggagaacatcctggcctgtccattggtgatgttgcgaagaaactgggagagatgtggaataacactgctgcagatgacaagcagccttatgaaaagaaggctgcgaagctgaaggaaaaatacgaaaaggatattgctgcatatcgagctaaaggaaagcctgatgcagcaaaaaagggagttgtcaaggctgaaaaaagcaagaaaaagaaggaagaggaggaagatgaggaagatgaagaggatgaggaggaggaggaagatgaagaagatgaangatgnnnacacntg

SEQ ID NO: 818 - DNA, 364 bp, Homo sapiens
  misc feature (304): n equals a,t,g, or c
  misc feature (334): n equals a,t,g, or c
  misc feature (336): n equals a,t,g, or c
  misc feature (339): n equals a,t,g, or c
  misc feature (362): n equals a,t,g, or c
ggcacgagaaaatgtcaggcctgattatctaaaagctatttggaatgtaatcaactgggagaatgtaactgaaagatacatggcttgcaaaaagtaaaccacgatcgttatgctgatcataccctaatgatcccagcaagataatgtcctttcttctaagatgtgcatcaagcctggtacatactgaaaaccctataaggtcctggataatttttgtttgattattcattgaagaaacatttattttccaattgtgtgaagtttttgactgttaataaaagaatctgtcaaccatcaaaaaaanaaaaaaaaaaaacctgggggggggccccgnanccnatttggccctttgggggggggtntt

SEQ ID NO: 819 - DNA, 462 bp, Homo sapiens
  misc feature (1): n equals a,t,g, or c
  misc feature (15): n equals a,t,g, or c
  misc feature (28): n equals a,t,g, or c
  misc feature (47): n equals a,t,g, or c
  misc feature (68): n equals a,t,g, or c
  misc feature (134): n equals a,t,g, or c
  misc feature (299): n equals a,t,g, or c
  misc feature (352): n equals a,t,g, or c
  misc feature (355): n equals a,t,g, or c
  misc feature (359): n equals a,t,g, or c
  misc feature (379): n equals a,t,g, or c
  misc feature (452): n equals a,t,g, or c
  misc feature (453): n equals a,t,g, or c
  misc feature (455): n equals a,t,g, or c
  misc feature (456): n equals a,t,g, or c
ntgatagacaagaangaaagtaacccgnactaaagggaacaaaagcnggagctccaccgcggtgccgnccgctctagaactagtggatcccccgggctgcaggaattcggcacgagctccgccagacagcgggncaaagtgctggcccatttctatggggtgaagctggagggcaaggtgcccatgcacaagctgttcttggagatgctcgaggccatgatggactgaggcaaggggtgggactggtgggggttctggccaggacctgccttagcatggggtccagccccaagggctgnggcggactggggtctgggcatgccacagcctgctggcaggccagggcatgccntcncccnggggaacaggccccacgccntttcttccccttctaaggggtgttcaaaactgggaacttttttccaggttttgggcacattgttgcccctttnnanncataaa

SEQ ID NO: 820 - DNA, 449 bp, Homo sapiens
  misc feature (8): n equals a,t,g, or c
gcgcgcantcccggctccctcccccttcggatgtggcttgagctgtaggcgcggagggccggagacgctgcagacccgcgacccggagcagctcggaggcggtgaataatagctcttcaagtctgcaataaaaaatggcctccaacaaaactacattgcaaaaaatgggaaaaaaacagaatggaaagagtaaaaaagttgaagaggcagagcctgaagaatttgtcgtggaaaaagtactagatcgacgtgtagtgaatgggaaagtggaatatttcctgaagtggaagggatttacagatgctgacaatacttgggaacctgaagaaaatttagattgtccagaattgattgaagcgtttcttaactctcagaaagctggcaaagaaaaagatggtaccaaaagaaaatctttatctgacagtggatctgatgacagcaaacaaaga

SEQ ID NO: 821 - DNA, 453 bp, Homo sapiens
  misc feature (29): n equals a,t,g, or c
  misc feature (392): n equals a,t,g, or c
  misc feature (409): n equals a,t,g, or c
  misc feature (430): n equals a,t,g, or c
  misc feature (433): n equals a,t,g, or c
  misc feature (434): n equals a,t,g, or c
cgcgtccggcctgactgcttgttcgtctnactggtgtgagctccagcatcccctttgctcgaaatggaccccaactgctcttgcgccactggtggctcctgcacgtgcgccggctcctgcaagtgcaaagagtgcaaatgcacctcctgcaagaagagctgctgttcctgctgccccgtgggctgtgccaagtgtgcccagggctgcgtctgcaaaggggcatcggagaagtgcagctgctgtgcctgatgtgggaacagctcttctcccatatgtaaatagaacaacctgcacaacctggatttttttaaaaatacaacactgagccatttgctgcatttcttttatactaaatatgtgactgacaataaaaacaattttgactttaaaanaaaaaaaaagggggccntttggggtccctgggggccanttnnggggatcgggaaagtttcc

SEQ ID NO: 822 - DNA, 474 bp, Homo sapiens
  misc feature (206): n equals a,t,g, or c
  misc feature (260): n equals a,t,g, or c
  misc feature (330): n equals a,t,g, or c
  misc feature (367): n equals a,t,g, or c
  misc feature (398): n equals a,t,g, or c
  misc feature (402): n equals a,t,g, or c
  misc feature (426): n equals a,t,g, or c
  misc feature (455): n equals a,t,g, or c
  misc feature (461): n equals a,t,g, or c
gaactaatgttagtataagtaacatgaaaacattctcctccgcataagcctgcgtcagattaaaacactgaactgacaattaacagcccaatatctacaatcaaccaacaagtcattattaccctcactgtcaacccaacacaggcatgctcataaggaaaggttaaaaaaagtaaaaggaactcggcaaatcttaccccgcctgnttaccaaaaacatcacctctagcatcaccagtattagaggcaccgactgcccangtgacacatgtttaacggccgcggtaccctaaccgtgcaaaggtagcataatcacttggtccttaattanggacctgtatgaatggctccacgagggttcaagctgnctcttacttttaaccagtgaaaatgacctgnccgngaagaggcgggcataacacagcangaccaagaagaccctatggagctttaatntattangcaaacagtccta

SEQ ID NO: 823 - DNA, 463 bp, Homo sapiens
  misc feature (441): n equals a,t,g, or c
gcccacgcgtccgcccacgcgtccgccctctcccaacatggcggcctcagcaaaaaagaagaataagaaggggaagactatctccctaacagactttctggctgaggatgggggtactggtggaggaagcacctatgtttccaaaccagtcagctgggctgatgaaacggatgacctggaaggagatgtttcgaccacttggcacagtaacgatgacgatgtgtatagggcgcctccaattgaccgttccatccttcccactgctccacgggctgctcgggaacccaatatcgaccggagccgtcttcccaaatcgccaccctacactgcttttctaggaaacctaccctatgatgttacagaagagtcaattaaggaattctttcgaggattaaatatcagtgcagtgcgtttaccacgtgaacccagcaatccagagangttgaaaggtttgggtatgctg

SEQ ID NO: 824 - DNA, 599 bp, Homo sapiens
  misc feature (4): n equals a,t,g, or c
  misc feature (9): n equals a,t,g, or c
  misc feature (46): n equals a,t,g, or c
  misc feature (88): n equals a,t,g, or c
  misc feature (117): n equals a,t,g, or c
  misc feature (126): n equals a,t,g, or c
  misc feature (183): n equals a,t,g, or c
  misc feature (203): n equals a,t,g, or c
  misc feature (207): n equals a,t,g, or c
  misc feature (209): n equals a,t,g, or c
  misc feature (231): n equals a,t,g, or c
  misc feature (234): n equals a,t,g, or c
  misc feature (250): n equals a,t,g, or c
  misc feature (253): n equals a,t,g, or c
  misc feature (271): n equals a,t,g, or c
  misc feature (279): n equals a,t,g, or c
  misc feature (287): n equals a,t,g, or c
  misc feature (294): n equals a,t,g, or c
  misc feature (302): n equals a,t,g, or c
  misc feature (307): n equals a,t,g, or c
  misc feature (319): n equals a,t,g, or c
  misc feature (328): n equals a,t,g, or c
  misc feature (329): n equals a,t,g, or c
  misc feature (333): n equals a,t,g, or c
  misc feature (362): n equals a,t,g, or c
  misc feature (372): n equals a,t,g, or c
  misc feature (385): n equals a,t,g, or c
  misc feature (414): n equals a,t,g, or c
  misc feature (418): n equals a,t,g, or c
  misc feature (420): n equals a,t,g, or c
  misc feature (423): n equals a,t,g, or c
  misc feature (440): n equals a,t,g, or c
  misc feature (474): n equals a,t,g, or c
  misc feature (486): n equals a,t,g, or c
  misc feature (544): n equals a,t,g, or c
  misc feature (579): n equals a,t,g, or c
  misc feature (581): n equals a,t,g, or c
  misc feature (586): n equals a,t,g, or c
gctnagatnttcccatatactgtggacaatgcccgcatcgttctgnagattgacaatgcccgtcttgctgctgatgactttagaggcnagtatgagacagatctggccatgcgccantctgtgganaacgacatccatgggctccgaaaggtcattgatgacaccaatatcacacgactgcanctggagacagagatcgaggntctnanggaggatctgctcttcatgaanaanaaccactaagaggaangancaaggcctacaagcccanattgccanctctgggntgaccgnggaggtanatgcncccaaatctcangacctcgcnnagancatgggagacatcccggcccaatatgacnagctggctcntaagaaccgagangaagctagaccagtactggtcttaaacanattnanganagcaccacagtggtcancacacagtctgctgaagttggaactgctgaaacnacgctcacagancttagacgtacaggccattccttggaaatatgaactggacttcattagaaatctgaangccctcttggaaaacaaccttgacgggaagtggangncccgntacgaccttacaa

SEQ ID NO: 825 - DNA, 500 bp, Homo sapiens
  misc feature (79): n equals a,t,g, or c
  misc feature (319): n equals a,t,g, or c
  misc feature (336): n equals a,t,g, or c
  misc feature (368): n equals a,t,g, or c
  misc feature (391): n equals a,t,g, or c
  misc feature (415): n equals a,t,g, or c
  misc feature (420): n equals a,t,g, or c
  misc feature (422): n equals a,t,g, or c
  misc feature (428): n equals a,t,g, or c
  misc feature (440): n equals a,t,g, or c
  misc feature (460): n equals a,t,g, or c
  misc feature (463): n equals a,t,g, or c
  misc feature (469): n equals a,t,g, or c
  misc feature (470): n equals a,t,g, or c
  misc feature (473): n equals a,t,g, or c
  misc feature (480): n equals a,t,g, or c
  misc feature (494): n equals a,t,g, or c
aattcggcacgaggaggaatgttaagttgattgccctttcaatagacagtgttgaggaccatcttgcctggagcaaggntatcaatgcttacaattgtgaagagcccacagaaaagttaccttttcccatcatcgatgataggaatcgggagcttgccatcctgttgggcatgctggatccagccagagaaggatgaaaagggcatgcctgtgacagctcgtgtggtgtttgtttttggtcctgataagaagctgaagctgtctatcctctacccagctaccactggcaggactttgatgagatctcagggtagtccanctctctccagctgacanagaaaaagggttgcacccagttgattggaggntgggataggtatggcctccaccncctgagagagcaaaaattttccgnagagntnacaagngtccttgcaganactcgtaaaccagctaagtntgngagtgnnttngcaagtntaatccatttttcngagatc

SEQ ID NO: 826 - DNA, 511 bp, Homo sapiens
  misc feature (266): n equals a,t,g, or c
  misc feature (274): n equals a,t,g, or c
  misc feature (344): n equals a,t,g, or c
  misc feature (406): n equals a,t,g, or c
  misc feature (414): n equals a,t,g, or c
  misc feature (419): n equals a,t,g, or c
  misc feature (421): n equals a,t,g, or c
  misc feature (424): n equals a,t,g, or c
  misc feature (449): n equals a,t,g, or c
  misc feature (456): n equals a,t,g, or c
  misc feature (467): n equals a,t,g, or c
  misc feature (483): n equals a,t,g, or c
  misc feature (490): n equals a,t,g, or c
  misc feature (496): n equals a,t,g, or c
aattcggcacgagcaggctgcttcttcgccagaaccaaccggttgcttgctgtcccagcggcgccccctcatcaccgtcgccatgcccggaggtctgcttctcggggacgtggctcccaactttgaggccaataccaccgtcggccgcatccgtttccacgactttctgggagactcatggggcattctcttctcccaccctcgggactttaccccagtgtgcaccacagagcttggcagagctgcaaagtggcaccagaatttgncaagaggnatgttaagttgattgccctttcaatagacagtgttgaggaccatcttgcctggagcaaggatatcaatgnttacaattgtgaggggccacagaaagttaccttttcccatcatcgtgataggatcggagttnccatcctnttggnangtnggtccacagagaaggtgaaagggangcctttnagtcgtgtggngtttttttggcccgtnagaagtnaagtgntatcttaccagtacc

SEQ ID NO: 827 - DNA, 519 bp, Homo sapiens
  misc feature (2): n equals a,t,g, or c
  misc feature (4): n equals a,t,g, or c
  misc feature (8): n equals a,t,g, or c
  misc feature (186): n equals a,t,g, or c
  misc feature (479): n equals a,t,g, or c
  misc feature (487): n equals a,t,g, or c
  misc feature (500): n equals a,t,g, or c
  misc feature (517): n equals a,t,g, or c
  misc feature (519): n equals a,t,g, or c
tntnaacngatttaggtgacactatagaaggtacgcctgcagtaccggtccggaattcccgggtcgacccacgcgtccgccacggtccgcactgcctcttcccttctcgcttgggaactctagtctcgcctcgggttgcaatggaccccaactgctcctgtgccgctgaggtgtctcctgcacctngccagtcctgcaagtgcaaagagtgcaaatgcacctcctgcaagaagagctgctgctcctgctgccctgtggctgtgccaagtgtgcccagggctgcatctgcaaaggggcatcggagaagtgcagctgctgcgcctgatgtcgggacagccctgctcccaagtacaaatagagtgacccgtaaaatccaggattttttgttttttgctacaatcttgacccctttgctacattcctttttttctgtgaaatatgtgaataataattaaacacttagacttgaaaaaaaaaanaaaaaaanaaaaaaggggggncctttttagggggttcncn

SEQ ID NO: 828 - DNA, 442 bp, Homo sapiens
  misc feature (2): n equals a,t,g, or c
  misc feature (11): n equals a,t,g, or c
  misc feature (14): n equals a,t,g, or c
  misc feature (21): n equals a,t,g, or c
  misc feature (25): n equals a,t,g, or c
  misc feature (128): n equals a,t,g, or c
  misc feature (438): n equals a,t,g, or c
ancagcgcacnatngggaacntggncgcctgcaggtaccggaccggaattcccgggtcgacccacgcgtccgggaggggacacgggctcattgcggtgtgcgccctgcactctgtccctcactcgccnccgacgacctgtctcgccgagcgcacgccttgccgccgccccgcagaaatgcttcggttacccacagtctttcgccagatgagaccggtgtccagggtactggctcctcatctcactcgggcttatgccaaagatgtaaaatttggtgcagatgcccgagccttaatgcttcaaggtgtagaccttttagccgatgctgtggccgttacaatggggccaaagggaagaacagtgattattgagcagagttggggaagtcccaaagtaacaagagatggtgtgactgttgcaaagtcattgacttaaaagnaaat

SEQ ID NO: 829 - DNA, 504 bp, Homo sapiens
  misc feature (19): n equals a,t,g, or c
  misc feature (35): n equals a,t,g, or c
  misc feature (122): n equals a,t,g, or c
  misc feature (139): n equals a,t,g, or c
  misc feature (343): n equals a,t,g, or c
  misc feature (362): n equals a,t,g, or c
  misc feature (391): n equals a,t,g, or c
  misc feature (489): n equals a,t,g, or c
aattcggcacgagcctgtntcgccgagcgcacgcnttgccgccgccccgcagaaatgcttcggttacccacagtctttcgccagatgagaccggtgtccagggtactggctcctcatctcantcgggcttatgccaaanatgtaaaatttggtgcagatgcccgagccttaatgcttcaaggtgtagaccttttagccgatgctgtggccgttacaatggggccaaagggaagaacagtgattattgagcagagttggggaagtcccaaagtaacaaaagatggtgtgactgttgcaaagtcaattgacttaaaagataaatacaaaaacattggagctaaanttgttcaagatgttgccantaacacaattgaggagctggggatggcantaccatgctactgttatggcacgtctatagccaaggaaggtttcgagaaggttagcaaggtgctaatccatgggaatcaggagaggtgtgatgttagngttgatgctgtattg

SEQ ID NO: 830 - DNA, 582 bp, Homo sapiens
  misc feature (6): n equals a,t,g, or c
  misc feature (9): n equals a,t,g, or c
  misc feature (11): n equals a,t,g, or c
  misc feature (12): n equals a,t,g, or c
  misc feature (13): n equals a,t,g, or c
  misc feature (15): n equals a,t,g, or c
  misc feature (30): n equals a,t,g, or c
gtcgtnacnannntntattaaagggttcanaagctggagctccaccgcggtgcggccgctctagaactagtggatcccccgggctgcaggaattcggcacaattcggcacgagggaaggtgctgtgtaatcattaaggagcggaggcttttggagctgctaaaatgccggattacctcggtgccgatcagcggaagaccaaagaggatgagaaggacgacaagcccatccgagctctggatgagggggatattgccttgttgaaaacttatggtcagagcacttactctaggcagatcaagcaagttgaagatgacattcagcaacttctcaagaaaattaatgagctcactggtattaaagaatctgacactggcctggccccaccagcactctgggatttggctgcagataagcagacactccagagtgaacagcctttacaggttgccaggtgtacaaagataatcaatgctgattcggaggacccaaaatacattatcaacgtaaagcagtttgccaagtttgtggtggaccttagtgatcaggtggcacctactgacattgaagaagggatgagagt

SEQ ID NO: 831 - DNA, 385 bp, Homo sapiens
  misc feature (98): n equals a,t,g, or c
  misc feature (142): n equals a,t,g, or c
  misc feature (274): n equals a,t,g, or c
  misc feature (322): n equals a,t,g, or c
  misc feature (356): n equals a,t,g, or c
  misc feature (358): n equals a,t,g, or c
  misc feature (373): n equals a,t,g, or c
  misc feature (374): n equals a,t,g, or c
cccacgcgtccgcccacgcgtccgggcggtggccggtgcggcgtgttcggtggcggctctggccgctcaggcgcctgcggctgggtgagcgcacgcanggcggcgaggcggcacgtgtttctaggtcgtggcgtcgggcttncggagctttggcggcactaggggaggatggcggagtcttcggataagctctatcgagtcgagtacgccaagagcgggcgcgcctcttgcaagaaatgcagcgagacatccccaaggactcgctccggatggncatcatggtgcatcgcccatgtttgatggaaaagtccacatggtacanttctcctgcttctggaagtgggcaatccatccgnanctgactttaagtgannggtttcttata

SEQ ID NO: 832 - DNA, 505 bp, Homo sapiens
  misc feature (5): n equals a,t,g, or c
  misc feature (162): n equals a,t,g, or c
  misc feature (198): n equals a,t,g, or c
  misc feature (333): n equals a,t,g, or c
  misc feature (335): n equals a,t,g, or c
  misc feature (380): n equals a,t,g, or c
  misc feature (405): n equals a,t,g, or c
  misc feature (411): n equals a,t,g, or c
  misc feature (435): n equals a,t,g, or c
  misc feature (438): n equals a,t,g, or c
  misc feature (461): n equals a,t,g, or c
  misc feature (474): n equals a,t,g, or c
  misc feature (479): n equals a,t,g, or c
  misc feature (496): n equals a,t,g, or c
  misc feature (497): n equals a,t,g, or c
ggcanagtgcagcctcagtgctatgaaggtgacagcgtgaggtgacccatctggcccgccgcgatgctggcaacacggcggctgctcggctggtcgcttcccgcgcggacagcacccaagaaaacctcatttggctcgctgaaggatgaagaccggattttnaccaacctgtacggccgccatgactggaggctgaangttccctgagtcgaggtgactggtacaagacaaaggagatcctgctgaaggggcccgactggatcctgggcgagatcaagacatcgggtttaaggggccgtggaggcgctggcttccccaatggcctcaagtggngnttcatgataaggcctcagatggcaggcccaagtatttggtggttnaacgcaaacgaggggggagccgggnaactgnaagaaccggggggtttttaggccnggntcttaaaaagtttttgaaggttnctttgttgggggnccggncatgggggcccggttgnntatttttt

SEQ ID NO: 833 - DNA, 444 bp, Homo sapiens
  misc feature (336): n equals a,t,g, or c
  misc feature (355): n equals a,t,g, or c
  misc feature (380): n equals a,t,g, or c
  misc feature (444): n equals a,t,g, or c
gctgcgagaagacgacagaaggggctctcccctcgtccaccgctgccgcctccttcttctgccgctcctggtgctgcttgtgtgctcgtttggtgcggacctggtacctcttttgtgaagcggcagctgaggagactccggcgctcgccatggccgacgaaaagcccaaggaaggagtcaagactgagaacaacgatcatattaatttgaaggtggcggggcaggatggttctgtggtgcagtttaagattaagaggcatacaccacttagtaaactaatgaaagcctattgtgaacgacagggattgtcaatgaagcagatcagattccgatttnacgggcaaccaatcaatgnaacagacacacctgcacagttgggnaatgggaggatgaagataccaatgatgtgttccaaacagcagacgggaggtgtctactgaaaan

SEQ ID NO: 834 - DNA, 370 bp, Homo sapiens
  misc feature (141): n equals a,t,g, or c
  misc feature (142): n equals a,t,g, or c
  misc feature (322): n equals a,t,g, or c
  misc feature (331): n equals a,t,g, or c
  misc feature (336): n equals a,t,g, or c
  misc feature (346): n equals a,t,g, or c
  misc feature (365): n equals a,t,g, or c
cccacgcgtccgcccacgcgtccgcgccgctcgctatggcgtcgctcaccgtgaaggcctaccttctgggcaaggaggacgcggcgcgcgagattcgccgcttcagcttctgctgcagccccgagcctgaggcgggaagcnnggctgcggcgggtccgggacccttgcgagcggctgctgagccgggtggccgccctgttccccgcgctgcggcctggcggctttccaggcgcactaccgcgattgaggacggggatttgttgcttttttccattgacgaggatttgacatgggcatgttctacgttgaagatgaatctttncgattttanatttnaagagaaaanatttccggcggggacacgncaagt

SEQ ID NO: 835 - DNA, 317 bp, Homo sapiens
  misc feature (174): n equals a,t,g, or c
  misc feature (215): n equals a,t,g, or c
  misc feature (258): n equals a,t,g, or c
  misc feature (270): n equals a,t,g, or c
  misc feature (288): n equals a,t,g, or c
  misc feature (301): n equals a,t,g, or c
  misc feature (311): n equals a,t,g, or c
cccacgcgtccgcccacgcgtccgcccacgcgtccgcccacgcgtccgcaatgagcttcgtgttgcccctgaagagcatcccaccctgctcacggaggcacccctgaaccccaaggccaaccgggagaaaatgactcaaattatgtttgagactttcaatgtccaagccatgtntttggctatccaggcggtgctgtctctctatgcctctggangcacaatggaatcgtgctggactctggagatggtgtcacccanaatgtcccaatntatgagggctatgcttgnccccatgcaatanatgggtctgnatttgg

SEQ ID NO: 836 - DNA, 382 bp, Homo sapiens
  misc feature (44): n equals a,t,g, or c
  misc feature (80): n equals a,t,g, or c
  misc feature (85): n equals a,t,g, or c
  misc feature (117): n equals a,t,g, or c
  misc feature (142): n equals a,t,g, or c
  misc feature (143): n equals a,t,g, or c
  misc feature (190): n equals a,t,g, or c
  misc feature (192): n equals a,t,g, or c
  misc feature (207): n equals a,t,g, or c
  misc feature (211): n equals a,t,g, or c
  misc feature (230): n equals a,t,g, or c
  misc feature (261): n equals a,t,g, or c
  misc feature (271): n equals a,t,g, or c
  misc feature (311): n equals a,t,g, or c
  misc feature (339): n equals a,t,g, or c
  misc feature (348): n equals a,t,g, or c
  misc feature (353): n equals a,t,g, or c
  misc feature (374): n equals a,t,g, or c
ccctctgcgcggcaacgtggtcccaagcccactgcccactcgcnggacgaggaccttttcggcgacggtgcgggcttcanagggncccgtttacaaaggagtctgcaaatgcttctnccggtccaagggccatggcttcatnnccccagctgatggcggccccgacatcttcctgcacatctttgaatgngnaagggggagtatgtnccantggaaggcgacgaggtcanctataaaatgtgcttccatcccacccaagantgagaagctncaagccgtgggagttcgtcatcaatcacctggcaccaggnaccaagtatgagacctggttttggacantttcatcantttcntaggagattggttggaagcancccttttt

SEQ ID NO: 837 - DNA, 375 bp, Homo sapiens
cggagtttctcctcggggtcggagcaggaggcacgcggagtgtgaggccacgcatgagcggacgctaaccccctccccagccacaaagagtctacatgtctagggtctagacatgttcagctttgtggacctccggctcctgctcctcttagcggccaccgccctcctgacgcacggccaagaggaaggccaagtcgagggccaagacgaagacatcccaccaatcacctgcgtacagaacggcctcaggtaccatgaccgagacgtgtggaaacccgagccctgccggatctgcgtctgcgacaacggcaaggtgttgtgcgatgacgtgatctgtgacgagaccaagaactgccccggcgccgaagtccccga

SEQ ID NO: 838 - DNA, 484 bp, Homo sapiens
  misc feature (1): n equals a,t,g, or c
  misc feature (8): n equals a,t,g, or c
  misc feature (14): n equals a,t,g, or c
  misc feature (18): n equals a,t,g, or c
  misc feature (36): n equals a,t,g, or c
  misc feature (117): n equals a,t,g, or c
  misc feature (138): n equals a,t,g, or c
  misc feature (153): n equals a,t,g, or c
  misc feature (187): n equals a,t,g, or c
  misc feature (267): n equals a,t,g, or c
  misc feature (273): n equals a,t,g, or c
  misc feature (300): n equals a,t,g, or c
  misc feature (352): n equals a,t,g, or c
  misc feature (360): n equals a,t,g, or c
  misc feature (368): n equals a,t,g, or c
  misc feature (391): n equals a,t,g, or c
  misc feature (405): n equals a,t,g, or c
  misc feature (425): n equals a,t,g, or c
  misc feature (445): n equals a,t,g, or c
  misc feature (476): n equals a,t,g, or c
nttctgancccagntganccaatagaaggtacgccngcaggttaccgcgtccggaaattcccgggtcgacccacgcgtccggccagccgttcacgcgttcggtcctccttggctgantcaccgccctcgccgccgcancatggacgcccccangcaggtggtcaactttgggcctggtcccgccaanctgccgcactcagtgttgttagagatacaaaaggaattattagactacaaaggaattggcattagtgttcttgaaatgantcacangtcatcagattttgcctagattattancaatacagaaaatcttgtgcgggaattgctaactgttccagacaactataangtgatttntctggcanggaagtgggtgcggccaattcantgctgtcccttaancctcattggcttgaaagcangaaagtgtgcggactatgtngtgacaggaacttggtcagctaagggcgcanaaaaaacc

SEQ ID NO: 839 - DNA, 473 bp, Homo sapiens
  misc feature (5): n equals a,t,g, or c
  misc feature (224): n equals a,t,g, or c
  misc feature (237): n equals a,t,g, or c
  misc feature (272): n equals a,t,g, or c
  misc feature (281): n equals a,t,g, or c
  misc feature (332): n equals a,t,g, or c
  misc feature (363): n equals a,t,g, or c
  misc feature (411): n equals a,t,g, or c
  misc feature (425): n equals a,t,g, or c
  misc feature (431): n equals a,t,g, or c
  misc feature (437): n equals a,t,g, or c
  misc feature (446): n equals a,t,g, or c
  misc feature (454): n equals a,t,g, or c
  misc feature (462): n equals a,t,g, or c
ggcanagtgaagacagcaagtttcggatccgcagcgcactgtaatggttgtcctctacagccatgtattcggctgctggcagagacttggggatggaaccgcacagagccgcgggccctttgccagctgcgaattttcgccctgacgttttcaacggaggtgactatactgggcaattgctggagaagattttgccaattgttgcttctgaatactcgattgantgaaagggttttnaattcatacgcggggttagccccaaatgttacaanttaaacagncaaaacagtccattggatgcagcggttttccatggagactgttcttacggntgacaaagattttttgaagcaagactaaagntgtattaggcattcccattattaaggcctggattacgggggggcattnctgcaatgctgtcnaaaatncccgtntttcaaggngttttttnccctactntggtttacaac

SEQ ID NO: 840 - DNA, 279 bp, Homo sapiens
  misc feature (5): n equals a,t,g, or c
  misc feature (31): n equals a,t,g, or c
  misc feature (62): n equals a,t,g, or c
  misc feature (104): n equals a,t,g, or c
  misc feature (173): n equals a,t,g, or c
  misc feature (229): n equals a,t,g, or c
  misc feature (244): n equals a,t,g, or c
  misc feature (247): n equals a,t,g, or c
  misc feature (260): n equals a,t,g, or c
  misc feature (277): n equals a,t,g, or c
ggcanaggatcacttgagctcaggagctcgnatgcagcctggggaacatggtgaaccttgtntctacataaaatacaaaaacttagatgggcatggtgctgtgngcctatagtcccactacttgtggggctaaggcaggaggatcacttgagccccggaggtcgaggctacantgcgccaagagtgcactactgtactccagccagggcaaggagagcgagaccctgtntcaaataaataaatnaanttaattaaataantaatttaaataaaagcnaa

SEQ ID NO: 841 - DNA, 234 bp, Homo sapiens
  misc feature (31): n equals a,t,g, or c
  misc feature (49): n equals a,t,g, or c
  misc feature (64): n equals a,t,g, or c
  misc feature (69): n equals a,t,g, or c
  misc feature (70): n equals a,t,g, or c
  misc feature (103): n equals a,t,g, or c
  misc feature (104): n equals a,t,g, or c
  misc feature (115): n equals a,t,g, or c
  misc feature (118): n equals a,t,g, or c
  misc feature (123): n equals a,t,g, or c
  misc feature (172): n equals a,t,g, or c
  misc feature (210): n equals a,t,g, or c
  misc feature (214): n equals a,t,g, or c
  misc feature (216): n equals a,t,g, or c
  misc feature (230): n equals a,t,g, or c
cgggctgcagagtaaatcaggccgcggtaanatggcacgagcaggtctnctggttatcggaggnaaggnntggcgaaacggtgtattaccgtttgctaccagnnaagaacgtganganaagangggcacgaggcctggtttttaaggagtgtcgccagagtgcctcgatganacgggtattggcggtatatggagttaaaagatgaccanctanangactgagctagtancagg

SEQ ID NO: 842 - DNA, 460 bp, Homo sapiens
  misc feature (32): n equals a,t,g, or c
  misc feature (383): n equals a,t,g, or c
  misc feature (445): n equals a,t,g, or c
  misc feature (447): n equals a,t,g, or c
  misc feature (451): n equals a,t,g, or c
  misc feature (453): n equals a,t,g, or c
gtcgacccacgcgtccgctgaccagcaccatngcggttggcaagaacaagcgccttacgaaaggcggcaaaaagggagccaagaagaaagtggttgatccattttctaagaaagattggtatgatgtgaaagcacctgctatgttcaatataagaaatattggaaagacgctcgtcaccaggacccaaggaaccaaaattgcatctgatggtctcaagggtcgtgtgtttgaagtgagtcttgctgatttgcagaatgatgaagttgcatttagaaaattcaagctgattactgaagatgttcagggtaaaaactgcctgactaacttccatggcatggatcttacccgtgacaaaatgtgttccatggtcaaaaaatggcanacaatgattgaagctcacgttgatgtcaagactaccgatggttacttgcttcgctgttctgngntggntntactaaa

SEQ ID NO: 843 - DNA, 597 bp, Homo sapiens
  misc feature (6): n equals a,t,g, or c
  misc feature (7): n equals a,t,g, or c
  misc feature (16): n equals a,t,g, or c
  misc feature (46): n equals a,t,g, or c
  misc feature (189): n equals a,t,g, or c
  misc feature (412): n equals a,t,g, or c
cagtgnngacaccaanccatcactaaagggaacaaaagctggagcnccaccgcggtgcggccgctctagaactagtggatcccccgggctgcaggaattcggcacgaggtccttccgaggaagctaaggctgcgttggggtgaggccctcacttcatccggcgactagcaccgcgtccggcagcgccancctacactcgcccgcgccatggcctctgtctccgagctcgcctgcatctactcggccctcattctgcacgacgatgaggtgacagtcacggaggataagatcaatgccctcattaaagcagccggtgtaaatgttgagcctttttggcctggcttgtttgcaaaggccctggccaacgtcaacattgggagcctcatctgcaatgtaggggccggtggacctnctccagcagctggtgctgcaccagcaggaggtcctgccccctccactgctgctgctccagctgaggagaagaaagtggaagcaaagaaagaagaatccgaggagtcttatgatgacatgggctttggtctttttgactaaacctcttttataacatgttcaataaaaagctgaactttacaaaaa

SEQ ID NO: 844 - DNA, 502 bp, Homo sapiens
  misc feature (1): n equals a,t,g, or c
  misc feature (2): n equals a,t,g, or c
  misc feature (5): n equals a,t,g, or c
  misc feature (6): n equals a,t,g, or c
  misc feature (7): n equals a,t,g, or c
  misc feature (8): n equals a,t,g, or c
  misc feature (16): n equals a,t,g, or c
  misc feature (29): n equals a,t,g, or c
  misc feature (32): n equals a,t,g, or c
  misc feature (51): n equals a,t,g, or c
  misc feature (63): n equals a,t,g, or c
  misc feature (95): n equals a,t,g, or c
  misc feature (135): n equals a,t,g, or c
  misc feature (224): n equals a,t,g, or c
  misc feature (244): n equals a,t,g, or c
  misc feature (276): n equals a,t,g, or c
  misc feature (399): n equals a,t,g, or c
  misc feature (402): n equals a,t,g, or c
nnggnnnncaaattanccctgcactgaanggnaacaaaagctgggagctcncaccgcggtggnggccgctctagtaactagtggatcccccgggnctgcagggaattcgggcacgagcaagccaagatgggtgcnatacaagtacatccaggtagctatggagaaagaagcagtctgatgtcatgcgctttcttctgagggtccgctgctggcagtaccgccanctctctgctctccacagggnctccccgccccacccggcctgataaagcgcgncgactgggctacaaggccaagcaaggttacgttatatataggattcgtgttcgccgtggtggccgaaaacgcccagttcctaagggtgcaacttacggcaagcctgtccatcatggtgttaancanctaaagtttgctcgaagccttcagtccgttgcagaggagcgagctggacgccactgtggggctctgagagtcctgaattcttactgggttggtgaagatt

SEQ ID NO: 845 - DNA, 601 bp, Homo sapiens
  misc feature (3): n equals a,t,g, or c
  misc feature (6): n equals a,t,g, or c
  misc feature (9): n equals a,t,g, or c
gcnganacnaaccctcactaaagggaacaaaagctggagctccaccgcggtgacgaccgctctagaactagtggatcccccgggctgcaggaattcggcagagctttgcttttccatccgcctttgatcgtcttcctcttcagccatccaggtaagccaagatgggtgcatacaagtacatccaggagctatggagaaagaagcagtctgatgtcatgcgctttcttctgagggtccgctgctggcagtaccgccagctctctgctctccacagggctccccgccccacccggcctgataaagcgcgccgactgggctacaaggccaagcaaggttacgttatatataggattcgtgttcgccgtggtggccgaaaacgcccagttcctaagggtgcaattacggcaagcctgtccatcatggtgttaacagctaaagtttgctcgaagccttcagtccgttgcagaggagcgagctggacgccactgtggggctctgagagtcctgaattcttactgggttggtgaagattccacatacaaattttttgaggttatcctcattgatccattccataaagctatcagaagaaatcctgaca

SEQ ID NO: 846 - DNA, 455 bp, Homo sapiens
  misc feature (5): n equals a,t,g, or c
  misc feature (14): n equals a,t,g, or c
  misc feature (20): n equals a,t,g, or c
  misc feature (28): n equals a,t,g, or c
  misc feature (32): n equals a,t,g, or c
  misc feature (42): n equals a,t,g, or c
  misc feature (115): n equals a,t,g, or c
  misc feature (171): n equals a,t,g, or c
  misc feature (181): n equals a,t,g, or c
aattntaattaaantcaccntcactaanggancaaagctggngctccaccgcggtggcggccgctctagcactagtggatcccccgggtctgcaggaattcggcacgagcgcagnaagcgagatgacgagggaacgtcatcgtttggaaagcgtcgcaataagacgcacangttgtgccgncgctgtggctctaaggcctaccaccttcagaagtcgacctgtggcaaatgtggctaccctgccaagcgcaagagaaagtataactggagtgccaaggctaaaagacgaaataccaccggaactggtcgaatgaggcacctaaaaattgtataccgcagattcaggcatggattccgtgaaggaacaacacctaaacccaagagggcagctgttgcagcatccagttcatcttaagaatgtcaacggttagtcatgcaataaatgttctggtttt

SEQ ID NO: 847 - DNA, 428 bp, Homo sapiens
  misc feature (5): n equals a,t,g, or c
  misc feature (21): n equals a,t,g, or c
attanccctcactaaaggggncaaaagctggggctccaccgcggtgacgaccgctctagaactagtggatcccccgggctgcaggaattcggcacgaggtcgcggcgacatggccaaacgtaccaagaaagtcgggatcgtcggtaaatacgggacccgctatggggcctccctccggaaaatggtgaagaaaattgaaatcagccagcacgccaagtacacttgctctttctgtggcaaaaccaagatgaagagacgagctgtggggatctggcactgtggttcctgcatgaagacagtggctggcggtgcctggacgtacaataccacttccgctgtcacggtaaagtccgccatcagaagactgaaggagttgaaagaccagtagacgctcctctactctttgagacatcactggcctataataa

SEQ ID NO: 848 - DNA, 348 bp, Homo sapiens
tcgcggcgacatggccaaacgtaccaagaaagtcgggatcgtcggtaaatacgggacccgctatggggcctccctccggaaaatggtgaagaaaattgaaatcagccagcacgccaagtacacttgctctttctgtggcaaaaccaagatgaagagacgagctgtggggatctggcactgtggttcctgcatgaagacagtggctggcggtgcctggacgtacaataccacttccgctgtcacggtaaagtccgccatcagaagactgaaggagttgaaagaccagtagacgctcctctactctttgagacatcactggcctataataaatgggttaatttatgtaac

SEQ ID NO: 849 - DNA, 365 bp, Homo sapiens
  misc feature (216): n equals a,t,g, or c
  misc feature (217): n equals a,t,g, or c
  misc feature (226): n equals a,t,g, or c
  misc feature (280): n equals a,t,g, or c
  misc feature (312): n equals a,t,g, or c
  misc feature (315): n equals a,t,g, or c
  misc feature (334): n equals a,t,g, or c
  misc feature (361): n equals a,t,g, or c
ggcagagcctaggtcgcggcgacatggccaaacgtaccaagaaagtcgggatcgtcggtaaatacgggacccgctatggggcctccctccggaaaatggtgaagaaaattgaaatcagccagcacgccaagtacacttgctctttctgtggcaaaaccaagatgaagagacgagctgtggggatctggcactgtggttcctgcatgaagacagtgnntggcggtgnctggacgtacaataccacttccgctgtcacggttaaagtccgccatcagaagantgaaggagttgaaagaccattagacgttcctntantctttgggacatcattggnctataattaatgggttaatttttggtnaaaa

SEQ ID NO: 850 - DNA, 276 bp, Homo sapiens
  misc feature (5): n equals a,t,g, or c
  misc feature (11): n equals a,t,g, or c
  misc feature (36): n equals a,t,g, or c
  misc feature (47): n equals a,t,g, or c
  misc feature (75): n equals a,t,g, or c
gacantaagangggaacaaaaaaacatggaacatgnacacagcaggntggcaggcacagcatcataggaactagntggatcccccagggctgcaggaattcggcacgaggccgaaaggaaagaaggccaagggaaagcccagctgtcgtgaagaagcaggaggctaagaaagtggtgaatcccctgtttgaagcctaagaattttggcattggacaggacatccagcccaaaagagactcacccgctttgtgaaatggctatatcaggttgcagcg

SEQ ID NO: 851 - DNA, 430 bp, Homo sapiens
  misc feature (70): n equals a,t,g, or c
  misc feature (94): n equals a,t,g, or c
  misc feature (174): n equals a,t,g, or c
  misc feature (313): n equals a,t,g, or c
  misc feature (348): n equals a,t,g, or c
  misc feature (362): n equals a,t,g, or c
  misc feature (364): n equals a,t,g, or c
gctgcgagaagacgacagaaaaaaaaaaaaaaaaaaaaaaagcgcggccgctgtcgagaagacgacagangggggccccggaagataaggccgntcgctgacgccgtgtttcctctttcggccgcgctggtgaacaggacccgtcgccatgggccgtgtgatccgtggacagangaagggcgccgggtctgtgttccgcgcgcacgtgaagcaccgtaaaggcgctgcgcgctgcgcgccgtggatttcgctgagcggaacggctacatcaagggcatcgtcaaggacatcatccacgacccgggccgcggcncgcccctcgccaaggtggtcttccgggatccgtancgtttaagaagcgngncggagctgttcattgccgccgagggcattcacacgggccagtttgtgtattgccgcaaaaaggccc

SEQ ID NO: 852 - DNA, 420 bp, Homo sapiens
  misc feature (13): n equals a,t,g, or c
  misc feature (31): n equals a,t,g, or c
  misc feature (36): n equals a,t,g, or c
  misc feature (81): n equals a,t,g, or c
  misc feature (84): n equals a,t,g, or c
  misc feature (92): n equals a,t,g, or c
  misc feature (101): n equals a,t,g, or c
  misc feature (176): n equals a,t,g, or c
  misc feature (247): n equals a,t,g, or c
  misc feature (263): n equals a,t,g, or c
  misc feature (280): n equals a,t,g, or c
  misc feature (285): n equals a,t,g, or c
  misc feature (289): n equals a,t,g, or c
  misc feature (302): n equals a,t,g, or c
  misc feature (317): n equals a,t,g, or c
  misc feature (372): n equals a,t,g, or c
  misc feature (399): n equals a,t,g, or c
  misc feature (404): n equals a,t,g, or c
  misc feature (411): n equals a,t,g, or c
  misc feature (418): n equals a,t,g, or c
gcggacgcgtgtntcgacccacgcgtccggncgagncgcgcggaggcggaggcttgggtgcgttcaagattcagcttcacncgnaagccacnggcatggcngaggaaggcattgctgctggaggtgtaatggacgttaatactgctttacaagaggttctgaagactgccctcatncacgatggcctagcacgaggaattcgcgaagctgccaaagccttagacaagcgccaagcccatctttgtgngcttgcatccaactgngatgagcctatgtatgncaagntggnggaggccctttgngctgaacaccaaatnaacctaattaagggttgatgacaacaagaaactaggagaatgggtaggcctttgnaaaaatgacagagaggggaaaccccgnaaagnggttggnttgcagntg

SEQ ID NO: 853 - DNA, 278 bp, Homo sapiens
  misc feature (126): n equals a,t,g, or c
  misc feature (127): n equals a,t,g, or c
  misc feature (128): n equals a,t,g, or c
ctcgtgccgaattcggcacgagccgccatcatgggtcgcatgcatgctcccgggaagggcctgtcccagtcggctttaccctatcgacgcagcgtccccacttggttgaagttgacatctgacgannngaaggagcagatttacaaactggccaagaagggccttactccttcacagatcggtgtaatcctgagagattcacatggtgttgcacaagtacgttttgtgacaggcaataaaattttaagaattcttaagtctaagggacttgctcctga

SEQ ID NO: 854 - DNA, 408 bp, Homo sapiens
  misc feature (5): n equals a,t,g, or c
  misc feature (9): n equals a,t,g, or c
  misc feature (104): n equals a,t,g, or c
gcggnacgntggaccggggtccttccgtgcgcgttgatatgattggccggcgaatcgtggttctcttttcctccttggctgtctgaagatagatcgccatcgtnaacgacaccgtaactatccgcactagaaagttcatgaccaaccgactacttcagaggaaacaaatggtcattgatgtccttcaccccgggaaggcgacagtgcctaagacagaaattcgggaaaaactagccaaaatgtacaagaccacaccggatgtcatctttgtatttggattcagaactcattttggtggtggcaagacaactggctttggcatgatttatgattccctggattatgcaaagaaaaatgaacccaaacatagacttgcaagacatggcctgtatgagaagaaaaagacct

SEQ ID NO: 855 - DNA, 424 bp, Homo sapiens
  misc feature (288): n equals a,t,g, or c
  misc feature (345): n equals a,t,g, or c
  misc feature (377): n equals a,t,g, or c
  misc feature (382): n equals a,t,g, or c
  misc feature (402): n equals a,t,g, or c
  misc feature (422): n equals a,t,g, or c
gggtcgacccacgcgtccgctatgacaccaagggtcgctttgctgtacatcgtattacacctgaggaggccaagtacaagttgtgcaaagtgagaaagatctttgtgggcacaaaaggaatccctcatctggtgactcatgatgcccgcaccatccgctaccccgatcccctcatcaaggtgaatgataccattcagattgatttggagactggcaagattactgatttcatcaagttcgacactggtaacctgtgtatggtgactggaggtgctaactagggaagantggtgtgatcaccaacagagagaggcaccctgggatcttttggacgtgggttcactngaaagatggccaatgggaacagctttgccaantcganttttccaacatttttgttanttgggcaaggggcaacaaanca

SEQ ID NO: 856 - DNA, 608 bp, Homo sapiens
  misc feature (270): n equals a,t,g, or c
  misc feature (303): n equals a,t,g, or c
  misc feature (339): n equals a,t,g, or c
  misc feature (529): n equals a,t,g, or c
  misc feature (537): n equals a,t,g, or c
  misc feature (555): n equals a,t,g, or c
  misc feature (575): n equals a,t,g, or c
  misc feature (599): n equals a,t,g, or c
gggcatctttcgggacaattggcacaagcgccgcaaaaccgggggcaagagaaagccctaccacaagaagcggaagtatgagttggggcgcccagctgccaacaccaagattggcccccgccgcatccacacagtccgtgtgcggggaggtaacaagaaataccgtgccctgaggttggacgtggggaatttctcctggggctcagagtgttgtactcgtaaaacaaggatcatcgatgttgtctacaatgcatctaataacgagctggntcgtaccaagaccctggtgaagaattgcatcgngctcatcgacagcacaccgtaccgacagtggtaccnagtcccactatgcgctgcccctggcccgcaagaagggagccaagctgactcctgaggaagaagagattttaaacaaaaaacgatctaaaaaaattcagaagaaatatgatgaaagggaaaaagaatgccaaaatcaagcaagtcttctggaggagcagtttcagcagggcaagcttcttgcgtgcatcgntttaaggnccggacagtgtggccgancagatggctatgtgctaaanggcaaagagtggagtctatcttangaaaacaag

SEQ ID NO: 857 - DNA, 450 bp, Homo sapiens
  misc feature (368): n equals a,t,g, or c
  misc feature (389): n equals a,t,g, or c
  misc feature (440): n equals a,t,g, or c
ggcacgagtggggccgtcttcctcatccttcctttttctcggggctcccgtggagccacctggacatgagacccgccctcaatgccgaagcctctcggaagcaatctttcgggacggaagttaagtagccccgagcgggaggctgtggcggaagtggtcgcgttaccgcktgtttgtgcgcatgcgccactctcgtctggccgccgcgctttcaggaggtgcttttggttctctccggtcttgtccacgctagggggtgcacgtackcccaactgtggtcgcgctctcaccccttctgctgckctcgtggccccctcgcgatggcgggcatcctgtttgaggatattttcgatgtgaaggatattganccggaaggcaagaagtttgancgagtgtctcgackgcattgtgagagtgaayttycaagatggvwbkaaacnaagakgtaaa

SEQ ID NO: 858 - DNA, 467 bp, Homo sapiens
  misc feature (6): n equals a,t,g, or c
  misc feature (9): n equals a,t,g, or c
  misc feature (10): n equals a,t,g, or c
  misc feature (17): n equals a,t,g, or c
  misc feature (18): n equals a,t,g, or c
  misc feature (20): n equals a,t,g, or c
  misc feature (38): n equals a,t,g, or c
  misc feature (41): n equals a,t,g, or c
  misc feature (45): n equals a,t,g, or c
  misc feature (49): n equals a,t,g, or c
  misc feature (456): n equals a,t,g, or c
gaaaanacnngaaccannangaagaatcgaaagagctntgncagncttnctcaaaaagtccgggaagctgaaagtccccgaatgggtggataccgtcaagctggccaagcacaaagagcttgctccctacgatgagaactggttctacacgcgagctgcttccacagcgcggcacctgtacctccggggtggcgctggggttggctccatgaccaagatctatgggggacgtcagagaaacggcgtcatgcccagccacttcagccgtggctccaagagtgtggcccgccgggtcctccaagccctggaggggctgaaaatggtggaaaaggaccaagatggcggtcgcaaactgacacctcagggacaaagagatctggacagaatcgccggacaggtggcagcttccaacaagaagcattagaacaaaccatgctggggtaataaattggcctnattcgtaaaaa

SEQ ID NO: 859 - DNA, 441 bp, Homo sapiens
  misc feature (29): n equals a,t,g, or c
  misc feature (30): n equals a,t,g, or c
  misc feature (378): n equals a,t,g, or c
  misc feature (396): n equals a,t,g, or c
  misc feature (403): n equals a,t,g, or c
  misc feature (405): n equals a,t,g, or c
  misc feature (422): n equals a,t,g, or c
gggtcgacccacgcgtccgaaaaactgtnngggagcttgacaaaggcatgcaggagagaacaggagcagccacagccaggagggagagccttccccaagcaaacaatccagagcagctgtgcaaacaacggtgcataaatgaggcctcctggaccatgaagctagtcctgagctgcgtcccggagcccacggtggtcatggctgccagagcgctctgcatgctggggctggtcctggccttgctgtcctccagctctgcgagggagttacgtggggcctgtctgccaaaccagtgtgccgtgccagccaaggacagggtggaattgcggcttacccccatgttcacccccaaggattgcaaaaaccggggttgctgcntttgaattccaggatccnggatggncntggtgttttcaagcccntgccaggaagcagaagcac

SEQ ID NO: 860 - DNA, 423 bp, Homo sapiens
  misc feature (369): n equals a,t,g, or c
  misc feature (379): n equals a,t,g, or c
  misc feature (401): n equals a,t,g, or c
tgggctacctgcattcactgaacatcgtttatagagacttaaaaccagagaatattttgctagattcacagggacacattgtccttactgacttcggactctgcaaggagaacattgaacacaacagcacaacatccaccttctgtggcacgccggagtatctcgcacctgaggtgcttcataagcagccttatgacaggactgtggactggtggtgcctgggagctttcttgtatgagatgctgtatggcctgccgcctttttatagccgaaacacagctgaaatgtacgacaacattctgaacaagcctctccagctgaaaccaaatattaccaattccgcaagacacctcctggaagggctcctgnagaaggacangacaaagcggctcgggggcaanggtgacttcatggagattaaga

SEQ ID NO: 861 - DNA, 429 bp, Homo sapiens
  misc feature (348): n equals a,t,g, or c
  misc feature (360): n equals a,t,g, or c
  misc feature (392): n equals a,t,g, or c
  misc feature (403): n equals a,t,g, or c
  misc feature (425): n equals a,t,g, or c
ggcacgagctcgtgcgctttggggctgctgggactcgcgtcggttggcgactcccggacgtaggtagtttgttgggccgggttctgaggccttgcttctctttacttttccactctaggccacgatgccgcagtaccagacctgggaggagttcagccgcgctgccgagaagctttacctcgctgaccctatgaaggcacgtgtggttctcaaatataggcattctgatgggaacttgtgtgttaaagtaacagatgatttagtttgtttggtgtataaaacagaccaagctcaagatgtaaagaagattgagaaattccacagtcaactaatgcgacttattgtagnccaaggagcccncaatttaccatgggaactgagtgaatggtttnaatgagacttntcgggtacttagggagtaaaancttt

SEQ ID NO: 862 - DNA, 596 bp, Homo sapiens
  misc feature (10): n equals a,t,g, or c
  misc feature (12): n equals a,t,g, or c
  misc feature (40): n equals a,t,g, or c
  misc feature (57): n equals a,t,g, or c
  misc feature (61): n equals a,t,g, or c
  misc feature (155): n equals a,t,g, or c
  misc feature (209): n equals a,t,g, or c
  misc feature (286): n equals a,t,g, or c
  misc feature (288): n equals a,t,g, or c
  misc feature (344): n equals a,t,g, or c
  misc feature (400): n equals a,t,g, or c
  misc feature (418): n equals a,t,g, or c
  misc feature (488): n equals a,t,g, or c
  misc feature (492): n equals a,t,g, or c
  misc feature (497): n equals a,t,g, or c
  misc feature (544): n equals a,t,g, or c
  misc feature (545): n equals a,t,g, or c
  misc feature (554): n equals a,t,g, or c
  misc feature (557): n equals a,t,g, or c
cgcggggcgncncgctctagaactagtggatcccctgggnctgcaggaattcggcanaggnaagtctcccagaagacagtgattatcaaggaagaggaagaagatactgcagagaagccagggaaggaagaggatgtcgtgactccaaaaccagncaagagaaagagagaccaggcagaggaggagcccaacagaataccaagccgcancctccgacggaccaaacttaaccaagaatcaacagcccccaaagtgctcttcacaggagtggtggatgctcgggganancgggctgtgctggcatggggggaaatctggctggttcacggtcaaagcttcccacnggttcatggatcgcatccgccggacattcaattcctgtgtggccctggggcggggnattccccattctgttccngggatgggtggcatcattcccgtcaagctggttttcttcttacccccgatgaatatgtggtgaacgaccnggcnccaanagaagaatttggctttactttcaagacgcattgagcagggtccgganngaaggtgcntanaagggtatgaatttatgtgaacctggatccaccacacca

SEQ ID NO: 863 - DNA, 441 bp, Homo sapiens
  misc feature (361): n equals a,t,g, or c
  misc feature (413): n equals a,t,g, or c
  misc feature (418): n equals a,t,g, or c
  misc feature (434): n equals a,t,g, or c
  misc feature (435): n equals a,t,g, or c
ggcagcttggcagtgaccaagaatgatgggcactaccgtggagatcccaactggtttatgaagtatgtggcccccagggagcttgggtctccgcatggggtgggaggtggcttgttctaaggagcttgcgagaaggattaggggaagcagatagccaagaaaggataaagtgagggtctgggatggggaataatgggtccttaatactccttgacccctccctttccaccctcctgcgctcagtctccctagcctatgaggcaagctagattagggaaaaaaagtgcacaggaaggcaatggggattgggctaagacgtaacacagggatcagaaaacgggtggaaaacacacatttctancaagtctttaacccggttcctccccttcttaggaaagcgcagagcttaaganggganttcacagagagccagnngcagga

SEQ ID NO: 864 - DNA, 355 bp, Homo sapiens
  misc feature (297): n equals a,t,g, or c
  misc feature (322): n equals a,t,g, or c
  misc feature (325): n equals a,t,g, or c
  misc feature (347): n equals a,t,g, or c
  misc feature (349): n equals a,t,g, or c
gacatcaccacggcggcagccatttaaacccctcacccagccagcgccccatcctgtctgtccgaacccagacacaagtcttcactccttcctgcgagccctgaggaagccttctttccccagacatggccaacaagggtccttcctatggcatgagccgcgaagtgcagtccaaaatcgagaagaagtatgacgaggagctgggaggagcggctggtggagtgggtccatagtggcagtgtgggccctgatgtggggccggcccagaccgtggggcgcttggggctttccaggttntggcttgaagattggcgttgatttntgnagcaagctgggttggaacagcntnttaccc

SEQ ID NO: 865 - DNA, 499 bp, Homo sapiens
  misc feature (330): n equals a,t,g, or c
  misc feature (343): n equals a,t,g, or c
  misc feature (353): n equals a,t,g, or c
  misc feature (388): n equals a,t,g, or c
  misc feature (391): n equals a,t,g, or c
  misc feature (395): n equals a,t,g, or c
  misc feature (406): n equals a,t,g, or c
  misc feature (412): n equals a,t,g, or c
  misc feature (425): n equals a,t,g, or c
  misc feature (427): n equals a,t,g, or c
  misc feature (435): n equals a,t,g, or c
  misc feature (444): n equals a,t,g, or c
  misc feature (462): n equals a,t,g, or c
  misc feature (465): n equals a,t,g, or c
  misc feature (469): n equals a,t,g, or c
  misc feature (480): n equals a,t,g, or c
  misc feature (490): n equals a,t,g, or c
aattcggcacgagactggaccaaattagacagagagaatcagatatcaccaaggagagaattcagaagatcctggcaactggtgccaatgttattctaaccactggtggaattgatgatatgtgtctgaagtattttgtggaggctggtgctatggcagttagaagagttttaaaaagggaccttaaacgcattgccaaagcttctggagcaactattctgtcaaccctggccaatttggaaggtgaagaaacttttgaagctgcaatgttgggacaggcagaagaagttgtacaggagagattttgtgatgatgagctgatcttaatcnaaatacctagggncgacggtttnatcggtttttttcggggggcaaaattttcccggtnttngggngggggcctttnaaaggncctttttgggagngnttttgggnaaattgggnccccgggggttttaaagnccntctntcccaaaattnccccagggtnggacctttt

SEQ ID NO: 866 - DNA, 353 bp, Homo sapiens
  misc feature (31): n equals a,t,g, or c
  misc feature (41): n equals a,t,g, or c
  misc feature (42): n equals a,t,g, or c
  misc feature (45): n equals a,t,g, or c
  misc feature (52): n equals a,t,g, or c
  misc feature (83): n equals a,t,g, or c
  misc feature (236): n equals a,t,g, or c
  misc feature (244): n equals a,t,g, or c
  misc feature (249): n equals a,t,g, or c
  misc feature (265): n equals a,t,g, or c
  misc feature (284): n equals a,t,g, or c
  misc feature (294): n equals a,t,g, or c
  misc feature (298): n equals a,t,g, or c
  misc feature (349): n equals a,t,g, or c
attgctggaaaactgcaggatggactcttgnacatcactanntgnagttttntggctccctggaacagcctgagcttagctcncgccggggcttcaccaagacctacactgttggctgtaaggaatgcacagtgtttccctgtttatccatcccctgtcaaactgcagagtggcactcattgcttgtggacggaccagctcctccaaggctctgaaaagggcttccagttcccgtnaaccttgnctggnctgacctcgggaagcnaggggctgtgacacctggnagtgccctgnggtncccagaatagcctggaatcctgtcccgaagttggtaagttggaagcctttnacat

SEQ ID NO: 867 - DNA, 566 bp, Homo sapiens
  misc feature (307): n equals a,t,g, or c
  misc feature (425): n equals a,t,g, or c
  misc feature (499): n equals a,t,g, or c
  misc feature (514): n equals a,t,g, or c
ccgcgcgcccgtcccgtcgccgccgccgccgccgcagacccctcggtcttgctatgtcgagctcacccgtgaagcgtcagaggatggagtccgcgctggaccagctcaagcagttcaccaccgtggtggccgacacgggcgacttccacgccatcgacgagtacaagccccaggatgctaccaccaacccgtccctgatcctggccgcagcacagatgcccgcttaccaggagctggtggaggaggcgattgcctatggccggaagctgggcgggtcacaagaggaccagattaaaaatgctattgntaaactttttgtgttgtttggagcagaaatactaaagaagattccgggccgagtatccacagaatagacgcaaggctctcctttgataaagatgcgatggtggccagagccaggcggntcatcgagctctacaaggaagctgggatcagcaagaccgaattcttataaagctgtcatcaacctggggaaggnattcaggctggaaangagctcgaaggagcagcacggcatccactgcaacatgacttaatcttctcct

SEQ ID NO: 868 - DNA, 413 bp, Homo sapiens
  misc feature (193): n equals a,t,g, or c
  misc feature (360): n equals a,t,g, or c
  misc feature (389): n equals a,t,g, or c
ggcacgagcggcgtcttagcggctgcgcggtggctgctccgtcctttcggtccaggcggcggcagggctgagccagcgacgccctccattcactctccgcgcccgttctccggctgtcctcccgttccgctgcccgccctgccaccatgacggaacaggccatctccttcgccaaagacttcttggccggagnatcgccgccgccatctccaagacggccgtggctccgatcgagcgggtcaagctgctgctgcaggtccagcacgccagcaagcagatcgccgccgacaagcagtacaagggcatcgtggactgcattgtccgcatcccaaggagcaggcgtgtgtccttctggagggnaactttgcaacgtcatcgctacttcccantcaagcctcaattcgcttcaagat

SEQ ID NO: 869 - DNA, 600 bp, Homo sapiens
  misc feature (143): n equals a,t,g, or c
  misc feature (329): n equals a,t,g, or c
  misc feature (337): n equals a,t,g, or c
  misc feature (398): n equals a,t,g, or c
  misc feature (547): n equals a,t,g, or c
  misc feature (548): n equals a,t,g, or c
  misc feature (555): n equals a,t,g, or c
  misc feature (583): n equals a,t,g, or c
  misc feature (588): n equals a,t,g, or c
gggactggagcaaggtcgtcctggcctatgagcctgtgtgggccattggtactggcaagactgcaacaccccaacaggcccaggaagtacacgagaagctccgaggatggctgaagtccaacgtctctgatgcggtggctcanagcacccgtatcatttatggaggctctgtgactggggcaacctgcaaggagctggccagccagcctgatgtggatggcttccttgtgggtggtgcttccctcaagcccgaattcgtggacatcatcaatgccaaacaatgagccccatccatcttccctacccttcctgccaagccagggactaancagcccanaagcccagtaactgccctttccctgcatatgcttctgatggtgtcatctgctccttcctgnggcctcatccaaactgtatcttcctttactggttatatcttcaccctgtaatggttgggaccaggccaatcccttctccacttactataatggttggaactaaacgtcaccaaggtggcttctccttggctgagagatggaaggcgtgnngggattngctcctgggttccctaagccctagtganggcanaagagaaaccat

SEQ ID NO: 870 - DNA, 497 bp, Homo sapiens
  misc feature (27): n equals a,t,g, or c
  misc feature (28): n equals a,t,g, or c
  misc feature (70): n equals a,t,g, or c
  misc feature (136): n equals a,t,g, or c
  misc feature (178): n equals a,t,g, or c
  misc feature (182): n equals a,t,g, or c
  misc feature (191): n equals a,t,g, or c
  misc feature (218): n equals a,t,g, or c
  misc feature (236): n equals a,t,g, or c
  misc feature (266): n equals a,t,g, or c
  misc feature (271): n equals a,t,g, or c
  misc feature (300): n equals a,t,g, or c
  misc feature (321): n equals a,t,g, or c
  misc feature (348): n equals a,t,g, or c
  misc feature (352): n equals a,t,g, or c
  misc feature (354): n equals a,t,g, or c
  misc feature (355): n equals a,t,g, or c
  misc feature (357): n equals a,t,g, or c
  misc feature (368): n equals a,t,g, or c
  misc feature (378): n equals a,t,g, or c
  misc feature (415): n equals a,t,g, or c
  misc feature (442): n equals a,t,g, or c
  misc feature (474): n equals a,t,g, or c
  misc feature (492): n equals a,t,g, or c
aattcggcacgagggcaggggcatccnnatcgagcgagtcgtctcctcggagggtggccggccctctgtngacctatccttccagccctcgaagcccctgagcaagtccagctcctctcccgagctgcagactctncaggacatcctcggggaccctggggacaaggccgacgtgggncggntgagccctnaggttaaggcccggtcacagtcagggnccctggacggggaaagtnctgcctggtcggtctcgggcgaagacagtngggancagcccgagggtcccttgacttccaggtncccccggttcgcccaagtggnctccggccccgtaggttacaacatttncgantnngncccatcacgcnagggcaaganattagagagggacgctttaagagcagagcacagcttnattcagagaagttccaggataacccanttcgtttcttgagtttacatcccttttttggnggataaaaagcatctttngccat

SEQ ID NO: 871 - DNA, 568 bp, Homo sapiens
  misc feature (3): n equals a,t,g, or c
  misc feature (7): n equals a,t,g, or c
  misc feature (435): n equals a,t,g, or c
  misc feature (484): n equals a,t,g, or c
  misc feature (510): n equals a,t,g, or c
  misc feature (533): n equals a,t,g, or c
ggncganaccaaccctcactaaagggaacaaaagctggagctccaccgcggtgcggccgctctagaactagtggatcccccgggctgcaggaattcggcacgagcgaagatgaaattaaccgccgcacagctgctgagaatgagtttgtggtgctgaagaaggatgtggatgctgcctacatgagcaaggtggagctggaggccaaggtggatgccctgaatgatgagatcaacttcctcaggaccctcaatgagacggagttgacagagctgcagtcccagatctccgacacatctgtggtgctgtccatggacaacagtcgctccctggacctggacggcatcatcgctgaggtcaaggcacagtatgaggagatggccaaatgcagccgggctgaggctgaagcctggtaccagaccaagtttgagaccctncaggcccaggctgggaagcatggggacgacctccggaatacccggaatnagatttcagagatgaaccgggccatncagaggctgcaggctgagatcgncaacatcaagaaccagcgtgccaagttggaggccg

SEQ ID NO: 872 - DNA, 228 bp, Homo sapiens
  misc feature (10): n equals a,t,g, or c
  misc feature (72): n equals a,t,g, or c
  misc feature (83): n equals a,t,g, or c
  misc feature (85): n equals a,t,g, or c
  misc feature (126): n equals a,t,g, or c
  misc feature (132): n equals a,t,g, or c
  misc feature (188): n equals a,t,g, or c
  misc feature (197): n equals a,t,g, or c
  misc feature (198): n equals a,t,g, or c
  misc feature (221): n equals a,t,g, or c
aattcggcanagcttcaaactctactcccactaatagctttttaatgacttctagcaagcctcgctaacctngccttaccccncnctattaacctactgggagaactctctgtggctagtaaccangttctnctgatcaaatatcactctcctacttacaggaactcaacatactagtgcacagcccnatactcccnntgacatatttaccacaacacaangggggct

SEQ ID NO: 873 - DNA, 433 bp, Homo sapiens
  misc feature (308): n equals a,t,g, or c
  misc feature (318): n equals a,t,g, or c
  misc feature (327): n equals a,t,g, or c
  misc feature (348): n equals a,t,g, or c
  misc feature (363): n equals a,t,g, or c
  misc feature (368): n equals a,t,g, or c
  misc feature (422): n equals a,t,g, or c
  misc feature (424): n equals a,t,g, or c
ctggcctcctgtcttagccttcctgggctgtgtctggagcctgggaccttgcttgtggggtaaaagcaacagaacacttgcccttcccaaaatgaagggagaggagatggggcttctcttcctctcccctgagtgggaaaggagctctgggggctggtccttcagcacagaggaggggtcactgaaagcgttattgaccagctgctgtaccttctgcatctcactccacgctcactgcctttttctcttccttgcattggctcctgtgcctgtgccggctcctgcaaatgcaaagatgcaaatgcacntccttgcaanaagagtgantgcaggcctttcctgcgaatntgggggatgggccanttaancaggaaccagacttgcagcagggcaggcatgacagtttcccaaacctctttaanangattcaatt

SEQ ID NO: 874 - DNA, 84 bp, Homo sapiens
  misc feature (50): n equals a,t,g, or c
  misc feature (53): n equals a,t,g, or c
  misc feature (58): n equals a,t,g, or c
  misc feature (73): n equals a,t,g, or c
  misc feature (75): n equals a,t,g, or c
agagagagagagagagagagagagagagagagagagagagagagagagcncgngccgnattcggccccacatntntcatcacca

SEQ ID NO: 875 - DNA, 507 bp, Homo sapiens
  misc feature (10): n equals a,t,g, or c
  misc feature (28): n equals a,t,g, or c
  misc feature (68): n equals a,t,g, or c
  misc feature (156): n equals a,t,g, or c
  misc feature (283): n equals a,t,g, or c
  misc feature (340): n equals a,t,g, or c
  misc feature (358): n equals a,t,g, or c
  misc feature (359): n equals a,t,g, or c
  misc feature (363): n equals a,t,g, or c
  misc feature (365): n equals a,t,g, or c
  misc feature (378): n equals a,t,g, or c
  misc feature (384): n equals a,t,g, or c
  misc feature (385): n equals a,t,g, or c
  misc feature (386): n equals a,t,g, or c
  misc feature (387): n equals a,t,g, or c
  misc feature (391): n equals a,t,g, or c
  misc feature (392): n equals a,t,g, or c
  misc feature (407): n equals a,t,g, or c
  misc feature (408): n equals a,t,g, or c
  misc feature (409): n equals a,t,g, or c
  misc feature (410): n equals a,t,g, or c
  misc feature (414): n equals a,t,g, or c
  misc feature (415): n equals a,t,g, or c
  misc feature (416): n equals a,t,g, or c
  misc feature (420): n equals a,t,g, or c
  misc feature (430): n equals a,t,g, or c
  misc feature (436): n equals a,t,g, or c
  misc feature (439): n equals a,t,g, or c
  misc feature (445): n equals a,t,g, or c
  misc feature (449): n equals a,t,g, or c
  misc feature (454): n equals a,t,g, or c
  misc feature (455): n equals a,t,g, or c
  misc feature (456): n equals a,t,g, or c
  misc feature (467): n equals a,t,g, or c
  misc feature (468): n equals a,t,g, or c
  misc feature (471): n equals a,t,g, or c
  misc feature (474): n equals a,t,g, or c
  misc feature (486): n equals a,t,g, or c
  misc feature (490): n equals a,t,g, or c
  misc feature (491): n equals a,t,g, or c
  misc feature (497): n equals a,t,g, or c
  misc feature (498): n equals a,t,g, or c
  misc feature (500): n equals a,t,g, or c
  misc feature (503): n equals a,t,g, or c
aattcggcanagcgggaatgctaatagngaaaatggggagcaggaggctgacaatgaggtagacgagnaagaggaagaaggtggggaggaagaggaggaggaagaagaaggtgatggtgaggaagaggatggagatgaagatgaggaagctgagtncagttacgggccaagcgggcagctgaagatgatgaggatgacgatgtcgataccaagaagcagaagaccgacgaggatgacttagacagcaaaaaaggaaaatttaaacttaaaaaaaaaaaggccnccgtgacctttttaccctccatttcccttttcagattttaaacgtggtcacctttcngttagaagggcccccccnnccancnttgggaattcccntttccnnnntttnncaggggttttttcannnncccnnncccnaaccttgggntttttnaanaggggngggnaaaannncccaatttttnnggnccntttttttttttnaaanntttttnnanggntttt

SEQ ID NO: 876 - DNA, 190 bp, Homo sapiens
  misc feature (24): n equals a,t,g, or c
  misc feature (37): n equals a,t,g, or c
ccaccttactaccagacaaccttnggcaaaccttttncccaaataaagtataggcgatagaaattgaaacctggcgcaatagatatagtaccgcaaggaaagatgaaaaattataaccaagcataatatagcaaggactaacccctataccttctgcataatgaattaactagaaataacttttgcaagg

SEQ ID NO: 877 - DNA, 315 bp, Homo sapiens
  misc feature (270): n equals a,t,g, or c
cagcagccaaaggcttgtccctgactttatatggctgctcctggcgagcgactgagtcgtccgtgaggaaaaagaggcgaggcttttccgagatcgtctcagcgatggcgcttcggtcgcggttttgggggttgttctcggtttgcaggaaccctggtaattagtcttgccccccttctcccagctcactcgcctgggcttgcacagtacattggaacgtgcgggttctattttgtattcgacgtgccggatcgaaatagagctcgcggnactgcgaagaccacagtaggaagttaaggacggggtcagtgctga

SEQ ID NO: 878 - DNA, 295 bp, Homo sapiens
  misc feature (4): n equals a,t,g, or c
  misc feature (44): n equals a,t,g, or c
  misc feature (50): n equals a,t,g, or c
  misc feature (55): n equals a,t,g, or c
  misc feature (59): n equals a,t,g, or c
  misc feature (60): n equals a,t,g, or c
  misc feature (62): n equals a,t,g, or c
  misc feature (68): n equals a,t,g, or c
  misc feature (69): n equals a,t,g, or c
  misc feature (82): n equals a,t,g, or c
  misc feature (83): n equals a,t,g, or c
  misc feature (127): n equals a,t,g, or c
  misc feature (132): n equals a,t,g, or c
  misc feature (137): n equals a,t,g, or c
  misc feature (142): n equals a,t,g, or c
  misc feature (151): n equals a,t,g, or c
  misc feature (160): n equals a,t,g, or c
  misc feature (165): n equals a,t,g, or c
  misc feature (172): n equals a,t,g, or c
  misc feature (191): n equals a,t,g, or c
  misc feature (192): n equals a,t,g, or c
  misc feature (197): n equals a,t,g, or c
  misc feature (198): n equals a,t,g, or c
  misc feature (225): n equals a,t,g, or c
  misc feature (256): n equals a,t,g, or c
  misc feature (265): n equals a,t,g, or c
  misc feature (268): n equals a,t,g, or c
  misc feature (275): n equals a,t,g, or c
  misc feature (293): n equals a,t,g, or c
aatncggcacgagagacagtttgctaatttaaaaatgtagcatnccattngtatntatnncnctcccnngccaaaaagattnnctaatactgcttgtaccagccagagaaagatccaaaacactacncagcnctctngcacngaggaaatntttcccccnacatngactccnggcctacatcagccaaacnnaaccnnggtggggtttggatttgatagccaatnagttctgtgctggttgcaaagaattgatatnttagatggnttntaatacntcagcagatttgtctttncg

SEQ ID NO: 879 - DNA, 441 bp, Homo sapiens
  misc feature (430): n equals a,t,g, or c
ctgaggtttacagttagaaaatgttctcaaaggtttatcagttatgtattgatgattggtaatctagaccctctggaggctgtagaatgtgaaaagatacagctgagctgacaagttttagggcactatcttctggaatgaaatcggccaagaaaatggttcaagggcatgggggttagagaatgtttcttttacctaaaaatgttaagccaactatggaagattggggtcgtgggggcatgaaatacaaaattatgataatttatacagaactaggtttctttatgttctgcaagaaggtttttattagctaatttggggaggggggccatgctgcagtattttttttcctggggaacatgccatttctgatggggaagttattttgtttacaagagttggtttaccacacaaccctgaatgaatgtgncaatggcctaa

SEQ ID NO: 880 - DNA, 112 bp, Homo sapiens
  misc feature (5): n equals a,t,g, or c
  misc feature (97): n equals a,t,g, or c
  misc feature (105): n equals a,t,g, or c
  misc feature (106): n equals a,t,g, or c
  misc feature (109): n equals a,t,g, or c
  misc feature (111): n equals a,t,g, or c
ggcanagcggcattgggaggggcgctctgagattaaagagttttacctctgaaaaaaaaaaaaaaaaaaaaaaaaaaaaaaaaaaaaaaaaaaaaanaaaaaaannaanana

SEQ ID NO: 881 - DNA, 162 bp, Homo sapiens
  misc feature (9): n equals a,t,g, or c
  misc feature (23): n equals a,t,g, or c
  misc feature (35): n equals a,t,g, or c
  misc feature (56): n equals a,t,g, or c
  misc feature (117): n equals a,t,g, or c
  misc feature (136): n equals a,t,g, or c
  misc feature (142): n equals a,t,g, or c
  misc feature (147): n equals a,t,g, or c
  misc feature (154): n equals a,t,g, or c
ggcagaccnaacatagatttaantaaatacattancgggggtaaaaatgaaaatcntaacccaagacatgaacatttttagctgtaacttaactattaaggccttttcccacacgcnttaatagtcccattttctntttggncattngtggctntgccccat

SEQ ID NO: 882 - DNA, 117 bp, Homo sapiens
  misc feature (5): n equals a,t,g, or c
  misc feature (10): n equals a,t,g, or c
  misc feature (91): n equals a,t,g, or c
  misc feature (104): n equals a,t,g, or c
  misc feature (109): n equals a,t,g, or c
  misc feature (113): n equals a,t,g, or c
  misc feature (117): n equals a,t,g, or c
ggcanagggnaaaaccccgcctctactaaaaatacaaaaaaaaaaaaaaaaaaaaaaaaaaaaaaaaaaaaaaaaaaaaaaaaaaaaaaanaaaaaaaaaaaanaaaanaaanaaan

SEQ ID NO: 883 - DNA, 452 bp, Homo sapiens
  misc feature (2): n equals a,t,g, or c
  misc feature (8): n equals a,t,g, or c
  misc feature (55): n equals a,t,g, or c
  misc feature (68): n equals a,t,g, or c
  misc feature (73): n equals a,t,g, or c
  misc feature (246): n equals a,t,g, or c
  misc feature (374): n equals a,t,g, or c
  misc feature (388): n equals a,t,g, or c
  misc feature (440): n equals a,t,g, or c
  misc feature (448): n equals a,t,g, or c
  misc feature (451): n equals a,t,g, or c
gnccaatntatcaatcacgcactgcactcatcagggcaaacctgggtacgcctgncaggtcaccggtnccggnaattcccgggtcgacccacgcgtccgcccacgcgtccgcccacgcgtccgcccacgcgtccgctcgtgccatgatctgtatttaatggtttttatttctcgggtgcatttgagagaagccacgctgtcctctcgagcccagatggaaagacgtttttgtgctgtgggcagcancctcccccgcagcggggttagggaagaaaactatcctgcgggttttaatttatttcatccagtttgttctccgggtgtggcctcagccctcagaacaatccgattcacgtagggaaatgtttaagganttctgcagctatgngcaatgtggcatgggggggcgggcagtcctgcccatgtgttccctcatctgntcagccancgnc

SEQ ID NO: 884 - DNA, 340 bp, Homo sapiens
  misc feature (90): n equals a,t,g, or c
  misc feature (96): n equals a,t,g, or c
  misc feature (206): n equals a,t,g, or c
  misc feature (251): n equals a,t,g, or c
  misc feature (257): n equals a,t,g, or c
  misc feature (263): n equals a,t,g, or c
  misc feature (280): n equals a,t,g, or c
  misc feature (282): n equals a,t,g, or c
  misc feature (284): n equals a,t,g, or c
  misc feature (333): n equals a,t,g, or c
aattcggcacaggtgaatcgcagcttctgagaccagggttgctccgtccgtgctccgcctcgccatgacttcctacagctatcgccagtngtcggncacgtcgtccttcggaggcctgggcggcggctccgtggcgttttgggccgggggtcgcctttcgcgcgcccagcattcacgggggctccggcggccgcggcgtatccgtntcctccgcccgctttgtgtcctcgtcctcctcgggggcctacggnggtggntaaggngggggtcctgaaccgcntncnaacggggtgctgggcgggcaacgaggaagcttaaaccatgcagaacctnaacgacc

SEQ ID NO: 885 - DNA, 52 bp, Homo sapiens
  misc feature (2): n equals a,t,g, or c
  misc feature (17): n equals a,t,g, or c
  misc feature (49): n equals a,t,g, or c
gncctatagtgagtcgnattacaattcactggccgtcgttttacaaccncgt

SEQ ID NO: 886 - DNA, 303 bp, Homo sapiens
  misc feature (26): n equals a,t,g, or c
  misc feature (100): n equals a,t,g, or c
  misc feature (118): n equals a,t,g, or c
  misc feature (119): n equals a,t,g, or c
  misc feature (120): n equals a,t,g, or c
  misc feature (148): n equals a,t,g, or c
  misc feature (193): n equals a,t,g, or c
gacctgcagagccctgctgcgcagangtgctgttttccagccctccccaaatgcattcttcaggtgcgtgtctgaagatcttggttttgctgtgcttganacacagctgatgctttannngctcaggtttactggctttataacagtnggcataacgcctaaagcatcccctctgcacgtgactgagcatgtncttaaccagaggagctgaacggagtgcagaaaatagtagttttagggcttagtgagcagaggaagcagcttctctggtgctttatttaatagaacatttaagagtgctca

SEQ ID NO: 887 - DNA, 649 bp, Homo sapiens
  misc feature (198): n equals a,t,g, or c
  misc feature (201): n equals a,t,g, or c
  misc feature (206): n equals a,t,g, or c
  misc feature (262): n equals a,t,g, or c
  misc feature (379): n equals a,t,g, or c
  misc feature (386): n equals a,t,g, or c
  misc feature (400): n equals a,t,g, or c
  misc feature (438): n equals a,t,g, or c
  misc feature (448): n equals a,t,g, or c
  misc feature (474): n equals a,t,g, or c
  misc feature (482): n equals a,t,g, or c
  misc feature (486): n equals a,t,g, or c
  misc feature (509): n equals a,t,g, or c
  misc feature (510): n equals a,t,g, or c
  misc feature (513): n equals a,t,g, or c
  misc feature (553): n equals a,t,g, or c
  misc feature (575): n equals a,t,g, or c
  misc feature (582): n equals a,t,g, or c
  misc feature (586): n equals a,t,g, or c
  misc feature (621): n equals a,t,g, or c
gggacacggcggtcgttttcccgaaaacatgggccctcccatgggccatttgctccctggaggccctcgcgtcttgctgagcccggggagttaggatgacgcgagcggtgagggagcccggaacgattccttcgcggaacaattgaggcgaagcctttgggagtactttgtgggacggaccctggcgggccctgccanacncacanggatggcggcggaagcggccgatttggggctgggggccgccgtccccgtggaactnaagcgggagcgacgcatggtgtgcgtggagtacccgggaattggtgcgtgatgtggctaaaatgctgcccactctgggcggggaaagaaaggggtctccccggatcttacccagaanccccccnagaaagcttgggancttgtttcttcccggggcccaaggaacccattacttgnccccccccgntgtttgggcccaaacccgctttccanttaccaancaanccttgcttgcttccccctttccnnggnaaaaaaaaaaacaaaagggggggggaaaaaaaaggggttntcttgggggcccctttaaaggnccccctncccnaaggttcccctttttgaaaattgggaaaaatcctntgggggttccttcttccccccccttttt

SEQ ID NO: 888 - DNA, 72 bp, Homo sapiens
  misc feature (53): n equals a,t,g, or c
  misc feature (60): n equals a,t,g, or c
  misc feature (66): n equals a,t,g, or c
  misc feature (67): n equals a,t,g, or c
  misc feature (68): n equals a,t,g, or c
gccctatagtgagtcgtattacaattcactggccgtcgttttacaacgtcgtnatgtggnaaaccnnntaat

SEQ ID NO: 889 - DNA, 238 bp, Homo sapiens
  misc feature (5): n equals a,t,g, or c
  misc feature (22): n equals a,t,g, or c
  misc feature (27): n equals a,t,g, or c
  misc feature (39): n equals a,t,g, or c
  misc feature (45): n equals a,t,g, or c
  misc feature (52): n equals a,t,g, or c
  misc feature (65): n equals a,t,g, or c
  misc feature (79): n equals a,t,g, or c
  misc feature (95): n equals a,t,g, or c
  misc feature (132): n equals a,t,g, or c
  misc feature (134): n equals a,t,g, or c
  misc feature (135): n equals a,t,g, or c
  misc feature (151): n equals a,t,g, or c
  misc feature (158): n equals a,t,g, or c
  misc feature (163): n equals a,t,g, or c
  misc feature (168): n equals a,t,g, or c
  misc feature (173): n equals a,t,g, or c
  misc feature (183): n equals a,t,g, or c
  misc feature (224): n equals a,t,g, or c
ggcanagtttttttttttaaanaaggngaaaacacatgnaatttnatttttntttaaccttaagnttgccaacttcttnccctgaacagcatttntcttgttttgatacccacctacacttatattagaaangnnctgcaaactatttagngactccnctttnaattnatggncgtatgcctnaagaatgttttgaaatataaagcctatcccgtttgcccagnttgtaaatttcagg

SEQ ID NO: 890 - DNA, 225 bp, Homo sapiens
  misc feature (123): n equals a,t,g, or c
  misc feature (185): n equals a,t,g, or c
  misc feature (204): n equals a,t,g, or c
  misc feature (217): n equals a,t,g, or c
  misc feature (223): n equals a,t,g, or c
  misc feature (224): n equals a,t,g, or c
acccacgcagtccgcgcgtcctccatcacgtgtctgttctctggggaggcagtaaggggccgtggagctggcctcggcctcggcatcgggagaggctggacttcctgtctctctgtgctgaanggctgcgatggcgcccgctctcactgacgcagcagctgaagcacaccatatccggttcaaantggctcccccatcctctancttgtcccctggncagtgnng

SEQ ID NO: 891 - DNA, 130 bp, Homo sapiens
  misc feature (87): n equals a,t,g, or c
  misc feature (90): n equals a,t,g, or c
  misc feature (96): n equals a,t,g, or c
  misc feature (103): n equals a,t,g, or c
  misc feature (129): n equals a,t,g, or c
ggcacgagcggcacgagggggggcccggtacccaattcgccctatagtgagtcgtattacaattcactggccgtcgttttacaactncgngatganggaaatntaaaatacttccgagctcgtatgttnt

SEQ ID NO: 892 - DNA, 421 bp, Homo sapiens
gcactgaagaacattactgagggggctaaccttggggactccaatttgccaatgatgagggaacatttgaaagaactgcaaattgtccttgccagctcttgggatccttggatacctggggccatttaagaagctaggggaattaggccacaacaccccctgggacatccgaaagctacaccacagatgccagtggttcatgccttcttcccgcaactttaggaaaatttatttatttattgtttattagttatggggggagaggggagatttaaaggaccagggacatgggaaccaagccatagggatcagaggggcttgtccttgaacactactggggtatattcaggctcatccacgcagctgctgggttcttgccctaacggccctcccctgcaacatccgtcttggaggagaggct

SEQ ID NO: 893 - DNA, 307 bp, Homo sapiens
  misc feature (228): n equals a,t,g, or c
  misc feature (264): n equals a,t,g, or c
  misc feature (289): n equals a,t,g, or c
  misc feature (305): n equals a,t,g, or c
  misc feature (307): n equals a,t,g, or c
ggaatgacaaaccctttgaatgaaattgtggcacaaaatctgttcaggttggtgtaccgtgtaaagtggggatggggtaaaagtggttaacgtcactgttggatcaacaaataaaggttacagttttgtaagagaagtgatttgaatacatttttctggaactattcataatatgaagttttcctagaaccactggagtttctagtttaatagtttgctatgcaatgnaccacctaaaacaatactttatattgttatttttcngaaagactcaaaacacctgtaattntaaaccttaatatganan

SEQ ID NO: 894 - DNA, 453 bp, Homo sapiens
  misc feature (5): n equals a,t,g, or c
  misc feature (18): n equals a,t,g, or c
  misc feature (76): n equals a,t,g, or c
  misc feature (129): n equals a,t,g, or c
  misc feature (403): n equals a,t,g, or c
  misc feature (404): n equals a,t,g, or c
  misc feature (405): n equals a,t,g, or c
  misc feature (453): n equals a,t,g, or c
gcggnacgcgtgggtggnacccacgcgtccgtcgacccacgcgtccgcgacctgggcaattatcccaacaaattanactcccctctgtcatgtcaatattggaattgtagctcacaggtgtttgcttanatcagtcatccagagaggaagaatgatagagaaaacttgtgctctgacactactgattcttacatagtggaacaatatctttcttgataatgaattgtagttattataaatcggtgatcacgtgaccctaaaggcacccaaataaatctttagtaaaataattctgatgacacaatgaatgaattatttttaaggcattttcttggactagcaatgtattcttagagtggcgactgaatgtgcatacctcaatgatccatgttttactcattcnnnggtccccaggccacccagggcaaccaggccctcctggacctcctgggn

SEQ ID NO: 895 - DNA, 596 bp, Homo sapiens
  misc feature (11): n equals a,t,g, or c
  misc feature (283): n equals a,t,g, or c
  misc feature (312): n equals a,t,g, or c
  misc feature (457): n equals a,t,g, or c
  misc feature (475): n equals a,t,g, or c
  misc feature (525): n equals a,t,g, or c
  misc feature (528): n equals a,t,g, or c
  misc feature (537): n equals a,t,g, or c
  misc feature (553): n equals a,t,g, or c
  misc feature (570): n equals a,t,g, or c
gcccacgcgtncgcccacgcgtccgagaaattgaaacctggcgcaatagatatagtaccgcaagggaaagatgaaaaattatagccaagcataatatagcaaggactaacccctataccttctgcataatgaattaactagaaataactttgcaaggagagccaaagctaagacccccgaaaccagacgagctacctaagaacagctaaaagagcacacccgtctatgtagcaaaatagtgggaagatttataggtagaggcgacaaacctaccgagcctggngatagctggtgccaagatagaatcttagntcaactttaaatttgcccacagaaccctctaaatccccttggaaatttaactggtagtccaaagaggaacagctctttggacactaggaaaaaaccttggagagagagtaaaaaatttaacacccatagtaggcctaaaagcagncaccaattaagaaagcgntcaagctcaacacccactacctaaaaaatcccaaacatataactgaactnctnacacccaantggaccaatctatcancctatagaagagctaanggtaggataaggaacatgaaaacatt

SEQ ID NO: 896 - DNA, 351 bp, Homo sapiens
  misc feature (183): n equals a,t,g, or c
gaaagaaggaaactagctcggaccgtgcaggtttgtaggtctgttggcctgtaggtttcggcacaagtttcagcgagagaaggagaaaactgccttggttggaaccttgcagtgcagggaaaggggtgtggcggcctttgctggggaaatggcggacgacaagtggggcggaggaggcctgcntccggaaagtcagtagaattcatcacaagagagctacaagagcctggaagaagctgaagacttgctaccctccatccttacttcaccctgggacctgaggagacctcttcaatcagaaatggaaacagagagattctcctgggaaacccctgccccataaacggccct

SEQ ID NO: 897 - DNA, 72 bp, Homo sapiens
  misc feature (5): n equals a,t,g, or c
  misc feature (9): n equals a,t,g, or c
  misc feature (58): n equals a,t,g, or c
  misc feature (59): n equals a,t,g, or c
  misc feature (68): n equals a,t,g, or c
ggcanaggnagagagagagagagaactagtctcgtgttttttttttttttttttgggnnaaaaatttnattt

SEQ ID NO: 898 - DNA, 383 bp, Homo sapiens
  misc feature (87): n equals a,t,g, or c
  misc feature (176): n equals a,t,g, or c
  misc feature (224): n equals a,t,g, or c
  misc feature (226): n equals a,t,g, or c
  misc feature (271): n equals a,t,g, or c
  misc feature (272): n equals a,t,g, or c
  misc feature (333): n equals a,t,g, or c
  misc feature (335): n equals a,t,g, or c
  misc feature (359): n equals a,t,g, or c
  misc feature (362): n equals a,t,g, or c
  misc feature (366): n equals a,t,g, or c
ggcacgagggggaaatcgcggtcttagcatccggcgcgcggcggttggaattgctgcgcccacgaggcaaccgctccggaacgccangtgggggcgaggcgtctcggagtctcagagacaccaaggcccctgcgacaaggtggctgcagctaggccgggggcgtcaggacgacggnagcgggttcgggtcggtgacacgcagacctgagggagctgggcccgcntnttccgcccgcgccccagcccttgcagatcgagatttgcgtcctannatggggaaaaaagcagaggccagggcgccgattttatttggagagaagcaagcttctttgncntcttttgggattaggaaatttcanacntggnaaaaatggtgtgtggtt

SEQ ID NO: 899 - DNA, 172 bp, Homo sapiens
  misc feature (97): n equals a,t,g, or c
  misc feature (115): n equals a,t,g, or c
  misc feature (131): n equals a,t,g, or c
  misc feature (143): n equals a,t,g, or c
  misc feature (161): n equals a,t,g, or c
ggcacgagcttgttcgtctcactggtgtgactccagcatcccctttgctcgaaatggaccccaactgctcttgcgccactggtggctcctgcacgtncgccggctcctgcaattncaaagagtgcaaatgnacctcctgcaanaagagctgctgttcctgntgccccgtgga

SEQ ID NO: 900 - DNA, 101 bp, Homo sapiens
  misc feature (29): n equals a,t,g, or c
  misc feature (40): n equals a,t,g, or c
  misc feature (54): n equals a,t,g, or c
  misc feature (89): n equals a,t,g, or c
  misc feature (99): n equals a,t,g, or c
gcagcagcacaggcgcgggtcccgggaanggccggctctnctcgcgcctagatntggaatctccttcacgaaaccgactcggctgtggncaccgcgcgncg

SEQ ID NO: 901 - DNA, 358 bp, Homo sapiens
  misc feature (24): n equals a,t,g, or c
  misc feature (36): n equals a,t,g, or c
  misc feature (97): n equals a,t,g, or c
  misc feature (335): n equals a,t,g, or c
  misc feature (341): n equals a,t,g, or c
  misc feature (348): n equals a,t,g, or c
  misc feature (349): n equals a,t,g, or c
  misc feature (358): n equals a,t,g, or c
ggcacgaggacagtctgcctgggncacagccctctnaccctggtactgcatgcacgcaatgctagctgcccctttcccgtcctgggcaccccgagtntcccccgaccccgggtcccaggtatgctcccacctccacctgccccactcaccacctctgcctagttccagacacctccacgcccacctggtcctctcccatcgcccacaaaagggggggcacgagggaacgagcttagctgagctgggaggagcagggtgagggtgggcgacccaggattccccctcccttcccaattaaagatgagggtattaaattgtcttggtttttaatttantattanttttttnntttttccan

SEQ ID NO: 902 - DNA, 423 bp, Homo sapiens
  misc feature (343): n equals a,t,g, or c
  misc feature (386): n equals a,t,g, or c
  misc feature (391): n equals a,t,g, or c
  misc feature (407): n equals a,t,g, or c
  misc feature (420): n equals a,t,g, or c
atttcctggctgacctgctagtccccacaaaagccaggttccctgcatttgaactctgaaaggatagcatgccacctgcaactcactgcatgaccctttctgtatattcaaacccaagctaagtgcttccgttgctttccaaggaaacaaagagtcaaactgtggacttgattttgttagcttttttcagaatttatctttcattcagttcccttccattatcatttacttttacttagaagtatccaaggaagtcttttaactttaatttccatttcttcctaaagggagagtgagtgatatgtacagtgttttggagatgtatacatatattccagaactngggggaatcttattaagttatggatataccaccgtaacggtcnaaaangtttaaagaacccatncggtaaggtaatnggg

SEQ ID NO: 903 - DNA, 362 bp, Homo sapiens
  misc feature (64): n equals a,t,g, or c
  misc feature (116): n equals a,t,g, or c
  misc feature (177): n equals a,t,g, or c
  misc feature (273): n equals a,t,g, or c
  misc feature (305): n equals a,t,g, or c
  misc feature (309): n equals a,t,g, or c
  misc feature (351): n equals a,t,g, or c
attcggcacgagagtatttagttggggcatgaataagtaaagtatgtaaagaggcgtgatagtnagggctgagtgggtatcaccttctcggtgagaaaatcaatttcctgagagtnttgtaaactaggacttagagtactaatcatggtgtttttcagaaattatatatatattttnaagtcagggtctcaccgtgtcgcccaggctggaggcagaggttgtggctcgtgccgaattcgatatcaagcttatcgataccgtcgacctcgaggngggggcccggtacccaattcgccctattagtnagtnggtattacaattcactgggccgtcgtttttaaaacgggggtnactggggaaac

SEQ ID NO: 904 - DNA, 309 bp, Homo sapiens
  misc feature (107): n equals a,t,g, or c
  misc feature (150): n equals a,t,g, or c
  misc feature (162): n equals a,t,g, or c
  misc feature (170): n equals a,t,g, or c
  misc feature (171): n equals a,t,g, or c
  misc feature (179): n equals a,t,g, or c
  misc feature (250): n equals a,t,g, or c
  misc feature (267): n equals a,t,g, or c
  misc feature (278): n equals a,t,g, or c
  misc feature (292): n equals a,t,g, or c
  misc feature (294): n equals a,t,g, or c
ggctgaggagagggcggaagtgtccgcacgtcgggcctccgaggcttctctttctcccctggcggtccggctctcgatggtggcgtgacgggggcgggggtggcggngcgttctcctcggttgggaaggaaccagcccgcgaacccaggncgggaagggggntcggcctnngggggaanggactgacatgtctctcgaagaccccttttttgtagtccgaggcgaggtgcagaaagcggtgaacacgggnccgcgggctgtaccagngctggtgcganctcctgcaagaaancncggcgttcggaacgc

SEQ ID NO: 905 - DNA, 388 bp, Homo sapiens
  misc feature (23): n equals a,t,g, or c
  misc feature (61): n equals a,t,g, or c
  misc feature (62): n equals a,t,g, or c
  misc feature (66): n equals a,t,g, or c
  misc feature (91): n equals a,t,g, or c
  misc feature (128): n equals a,t,g, or c
  misc feature (129): n equals a,t,g, or c
  misc feature (191): n equals a,t,g, or c
  misc feature (251): n equals a,t,g, or c
  misc feature (304): n equals a,t,g, or c
  misc feature (318): n equals a,t,g, or c
  misc feature (364): n equals a,t,g, or c
  misc feature (375): n equals a,t,g, or c
  misc feature (381): n equals a,t,g, or c
ggcagagggccaaagtaaccttntaatgtccggctggttttggacagcaacaccggctggnnctgnacccaggagcagctgcaccacttgnaaagtcgcctcatctcctaagcactcctttcccctgnngtccccttcgaaccctgaagccctctggtgcgcgctctgcccgatgcacagccacctaagcnagcccccaggttagaaacgtgggttaaagctcttgcctgccccgttaaagcttcactccnacccttttaagcgtcctgccccttcaccttgaacccgggttcccccattccanttcctgggctttgncatgatttggttggttcaatggttccttctttcctgagggggcttnagggttttggngggggntaaggtt

SEQ ID NO: 906 - DNA, 349 bp, Homo sapiens
  misc feature (16): n equals a,t,g, or c
  misc feature (17): n equals a,t,g, or c
  misc feature (36): n equals a,t,g, or c
  misc feature (50): n equals a,t,g, or c
  misc feature (91): n equals a,t,g, or c
  misc feature (170): n equals a,t,g, or c
  misc feature (219): n equals a,t,g, or c
  misc feature (316): n equals a,t,g, or c
  misc feature (337): n equals a,t,g, or c
ggcacgaggtttttannttgtactcttttggatggngttgcatttataantcttaacccgagggtgtgtttcaacttatgtacgtactgtntcatgcaggtttatagcacggtagagtagaaggcggcttctgattttaagggtatttttagaattcattcctgaatgangggttcagacacccagtctcctcggaacaggggtgaggggtcgactganctttgttgagaagcctccagttaaggcttcgggcgggtctccatgttgtattgtgtgtttactgagcttcccactggttagaagatgacacatttgnccatcgtcctgtgtatctganattcccagggga

SEQ ID NO: 907 - DNA, 469 bp, Homo sapiens
  misc feature (11): n equals a,t,g, or c
  misc feature (38): n equals a,t,g, or c
  misc feature (41): n equals a,t,g, or c
  misc feature (53): n equals a,t,g, or c
  misc feature (102): n equals a,t,g, or c
  misc feature (138): n equals a,t,g, or c
  misc feature (141): n equals a,t,g, or c
  misc feature (161): n equals a,t,g, or c
  misc feature (182): n equals a,t,g, or c
  misc feature (189): n equals a,t,g, or c
  misc feature (201): n equals a,t,g, or c
  misc feature (203): n equals a,t,g, or c
  misc feature (216): n equals a,t,g, or c
  misc feature (245): n equals a,t,g, or c
  misc feature (279): n equals a,t,g, or c
  misc feature (292): n equals a,t,g, or c
  misc feature (302): n equals a,t,g, or c
  misc feature (306): n equals a,t,g, or c
  misc feature (322): n equals a,t,g, or c
  misc feature (331): n equals a,t,g, or c
  misc feature (333): n equals a,t,g, or c
  misc feature (351): n equals a,t,g, or c
  misc feature (395): n equals a,t,g, or c
  misc feature (445): n equals a,t,g, or c
  misc feature (460): n equals a,t,g, or c
  misc feature (462): n equals a,t,g, or c
  misc feature (465): n equals a,t,g, or c
gacaatacacnttactaccagacaaccttagccaaacnatntacccaaataangtataggcgatagaaattgaaacctggcgcaatagatatagtaccgcangggaaagatgaaaaattataaccaagcataatatancanggactaacccctataccttntgcataatgaattaactaganataactntgcaaggagagncnaagctaagacccncgaaaccagacgagctacctaagaacagntaaaagagcacacccgtatatgtagcaaaatagngggaagatttatnggtagaggcnacanacctaccgagcctggngatatgctngntgtccaagataagaatcntaggttaacttttaaatttggccacagaacccttttaaatcccnttggaaatttaactggtaagcccaaagaggaacaagttttttggacactngggaaaaaaccttgnanaanagag

SEQ ID NO: 908 - DNA, 95 bp, Homo sapiens
  misc feature (78): n equals a,t,g, or c
  misc feature (79): n equals a,t,g, or c
  misc feature (80): n equals a,t,g, or c
  misc feature (81): n equals a,t,g, or c
  misc feature (93): n equals a,t,g, or c
ggcacgagcccacacccacccaagaacagggtttgttaaaaaaaaaaaaaaaaaaaaaaaaaaaaaaaaaaaaaaaannnnggggggggcccngt

SEQ ID NO: 909 - DNA, 373 bp, Homo sapiens
  misc feature (80): n equals a,t,g, or c
  misc feature (222): n equals a,t,g, or c
  misc feature (225): n equals a,t,g, or c
  misc feature (271): n equals a,t,g, or c
  misc feature (330): n equals a,t,g, or c
  misc feature (334): n equals a,t,g, or c
  misc feature (337): n equals a,t,g, or c
  misc feature (367): n equals a,t,g, or c
  misc feature (372): n equals a,t,g, or c
ggtggccagctgttactgggtttaaaacaggactgtttcttgttaagatgggggaactgctttcctgccaaaagtgccanagatcaacttggaaaacaaaatcctcacagagggagagtaaagaacacttgattagtctcattagcacctgtagctacttttctaaagttaattcctgaaggcccttgaaagcttcactatgagattgaatttgcaccattnctncaatggtctttgcaatgagggatgggggatagtgtgatggtccttnccaaccatccctggaagaagaagccaaaaaactttttcccgaaaggagttctttcaccnaagnagntcccatctgggcaggaaattacctccgggnaacana

SEQ ID NO: 910 - DNA, 721 bp, Homo sapiens
  misc feature (516): n equals a,t,g, or c
  misc feature (624): n equals a,t,g, or c
  misc feature (627): n equals a,t,g, or c
  misc feature (691): n equals a,t,g, or c
gtatagatcatacttatgaaggtgataactgacacgtgttccctgaattttaatttgataggcaatacatctacccactccattattttttaaaacttcatttaatagtttaaacaagattggttttgttttcaatttttattcactcttcatagaatcacaattacctttatatatcatatgttattggaagagattcctcagtaatctccaatctctcatagtgcctcacagggttggtcaatggcttttggaactggaaggaccttagaacttatctgttatgctcctgatagccaatagcagatagaagcttgcaatcaagagggtaggacatgtgttcttcaatggatatcaaaggaagaggttgcaaaccaaagccatttggcaagccctgtagcctgggccatttaagacaggggcggtctcagccaaattgcacccatttaactatcccaaagagccacaagtgcctacaacccaggccctaagttgatgaagaaaaagtcaaggaangaggtgatcaattggaaatattcccatcaaatgggtaaacttatttagaaaatgggcatattagaaaaagccttccaagatgattttggataataaaagtggatttgnggnaatgggaataactctggttaagccctacattatcccttacatttggtttagggacctactgacntaaattaaggaaacatggtaaagtaccttg

SEQ ID NO: 911 - DNA, 564 bp, Homo sapiens
  misc feature (338): n equals a,t,g, or c
  misc feature (342): n equals a,t,g, or c
  misc feature (365): n equals a,t,g, or c
  misc feature (366): n equals a,t,g, or c
  misc feature (370): n equals a,t,g, or c
  misc feature (376): n equals a,t,g, or c
  misc feature (411): n equals a,t,g, or c
  misc feature (445): n equals a,t,g, or c
  misc feature (475): n equals a,t,g, or c
  misc feature (481): n equals a,t,g, or c
  misc feature (493): n equals a,t,g, or c
  misc feature (494): n equals a,t,g, or c
  misc feature (505): n equals a,t,g, or c
  misc feature (525): n equals a,t,g, or c
ggcgacgcctagaagctccccttcaaagttggccccacgcgctgaatgtggaaagttgactgggacccagtagtttcccatcccaaacctgctttccgagaagggcttcaaacccaaaatgtgaatcccgcctcccctctcagccagaactgtggactcgtcccggggaggggcggtgggtggggcggggctggcgggaaatttcggttttggcgcgctccctgcggcgacgctccatcgtgcgctctcctcttcccccggtggtctcctcgctcgccttctggctctgcatgccctgctctgaagagacacccgccatttcacccagtaagcgggcncggntgcggaagtgggcggcatgcagnnccgntttgcncggttttcgagcaagccaaggccccaacggggttngggcgcgcgggggttaagactgtaaaatggctangattaaacataccactatggagaaattttntgaaanggaattcaaaanngtccttttggngtaatgaaaatggtcaagtnaggttggtgaaaaatttttgattagactgggtaaaatga

SEQ ID NO: 912 - DNA, 408 bp, Homo sapiens
  misc feature (360): n equals a,t,g, or c
  misc feature (380): n equals a,t,g, or c
  misc feature (383): n equals a,t,g, or c
  misc feature (384): n equals a,t,g, or c
  misc feature (395): n equals a,t,g, or c
tcgacccacgcgtccgcggtgctcggagtgtggtacttctcctagttgcagtcaggcttcatacgctattgtcctgcccgttagagcagccagcgggtacagaatggattttggaagagggagtcaccactggacctccaaggaagccacgtgcagacatctacaaccttcgatctcctgacgagtttattgttggccaaaaccaggctttgattgaaccaggatgaatgcgggtgttggaagtagaatatatatatacatataaaattggttgggagccacgtgtaccagtgtgtgttgatcttggcttgattcagtctgccttgtaacagaactggcgatggaatatgagaggagccnctggaaagaaaaggacaganccnntgctttcatgnaagtgagatctgg

SEQ ID NO: 913 - DNA, 355 bp, Homo sapiens
  misc feature (139): n equals a,t,g, or c
  misc feature (141): n equals a,t,g, or c
  misc feature (246): n equals a,t,g, or c
  misc feature (328): n equals a,t,g, or c
  misc feature (331): n equals a,t,g, or c
  misc feature (334): n equals a,t,g, or c
  misc feature (343): n equals a,t,g, or c
  misc feature (346): n equals a,t,g, or c
ggcacaggggtgagtgtttctcctgcgttgctccgagggcccaatcctcctgccatcgccgccatcctggcttcgggggcgccggcctccaggccccgggaaggagaactcctagggctactaaatcctcgctggaggngntggcttcttatgcgggaggacgtggcggagggcctgactttgggagccgggggttgactggattggtgaggcccgtgtggctacttctgtggaagcagtgctgtnagttactggaagataaaagggaaagcaagcccttggtgggggaaatatggctgcgatgatggcattcttaggacaccttggntantantgaaacaantanctctgagca

SEQ ID NO: 914 - DNA, 377 bp, Homo sapiens
  misc feature (6): n equals a,t,g, or c
  misc feature (143): n equals a,t,g, or c
  misc feature (275): n equals a,t,g, or c
  misc feature (298): n equals a,t,g, or c
  misc feature (311): n equals a,t,g, or c
  misc feature (314): n equals a,t,g, or c
  misc feature (328): n equals a,t,g, or c
  misc feature (368): n equals a,t,g, or c
cgaggnctgctggcgccgggggccccgtgcgcggcctgctcgtcggcctcgtgcgccaacaacgccttcgccttcggtccggagctcagcagcctcatcacgccgctcgccatccagacccacaactttgccgccgtggccgncgccgcctactaccgcagtcagcagcagcagcagcagcagggcctggcgccccccgcgcagcgccggcgccgcccagcgcgaccctccccgccggggccgccgcacctccctcgccgcccttcagcttccanctgccgcgccggccttgtccgantcgcccgtgtttngangcggcccccaagcnccccgggattcgctgttcggaacgggaaagtaacttaaancgggttcct

SEQ ID NO: 915 - DNA, 509 bp, Homo sapiens
  misc feature (133): n equals a,t,g, or c
  misc feature (166): n equals a,t,g, or c
  misc feature (172): n equals a,t,g, or c
  misc feature (226): n equals a,t,g, or c
  misc feature (407): n equals a,t,g, or c
  misc feature (431): n equals a,t,g, or c
  misc feature (482): n equals a,t,g, or c
  misc feature (493): n equals a,t,g, or c
  misc feature (501): n equals a,t,g, or c
ggcagagtgggaagaaagtaagtgggcagtgcctgtttgttgaactggtaccaacctctgcctctcccttccaaattcttggtgccaccattgagaaactccaggattgtcctgcagatcgacaacgcccgtntggctgcagatgaacttccgaaccaagtaagtntctctntcctgggggctgcagaagccaggactggggtaggggttggggggtttaggaatntgccctcacctagcctagatggcctgaagctaaacccccctatggactcctgaactctggggaggtagggaagtcttcagagatgctgaggaagctctgcctggctgcaactattttccttgaaaggtttgagacggaacaggtttgcgcatgagcgtggtaggccgacatcaacggctgngcaggtgctggatgagctgacctngccagaccgacctggagatgcaatcgaaggcctaaggagagttggctactnaagaggacctnagagtggnttaagttg

SEQ ID NO: 916 - DNA, 135 bp, Homo sapiens
  misc feature (1): n equals a,t,g, or c
  misc feature (25): n equals a,t,g, or c
  misc feature (58): n equals a,t,g, or c
  misc feature (62): n equals a,t,g, or c
  misc feature (77): n equals a,t,g, or c
  misc feature (102): n equals a,t,g, or c
  misc feature (115): n equals a,t,g, or c
ntaccagcaaattacttcatcatcnagattatccattcagttgatcctaattagcaangatnacaacgtaacacaangcttacttatagcacccaacaaaantgtctctgtgganccacttcccagtgaactaca

SEQ ID NO: 917 - DNA, 230 bp, Homo sapiens
  misc feature (54): n equals a,t,g, or c
  misc feature (68): n equals a,t,g, or c
  misc feature (80): n equals a,t,g, or c
  misc feature (92): n equals a,t,g, or c
  misc feature (95): n equals a,t,g, or c
  misc feature (116): n equals a,t,g, or c
  misc feature (122): n equals a,t,g, or c
  misc feature (150): n equals a,t,g, or c
  misc feature (166): n equals a,t,g, or c
  misc feature (192): n equals a,t,g, or c
  misc feature (207): n equals a,t,g, or c
  misc feature (228): n equals a,t,g, or c
tcgacccacgcgtccggcttctccgctccttctaggatctccgcctggttcggnccgcctgcctccantcctgcctctancatgtccatcanggngacccagaagtcctacaaggngtccanctctgggccccggggcttcagcagccgntcctacacgagtgggnccggttcccgcatcagctcctcgagnttctcccgagtgggnagcagcaactttcgcggtggnct

SEQ ID NO: 918 - DNA, 529 bp, Homo sapiens
  misc feature (286): n equals a,t,g, or c
  misc feature (297): n equals a,t,g, or c
  misc feature (334): n equals a,t,g, or c
  misc feature (337): n equals a,t,g, or c
  misc feature (374): n equals a,t,g, or c
  misc feature (384): n equals a,t,g, or c
  misc feature (407): n equals a,t,g, or c
  misc feature (410): n equals a,t,g, or c
  misc feature (427): n equals a,t,g, or c
  misc feature (429): n equals a,t,g, or c
  misc feature (461): n equals a,t,g, or c
  misc feature (481): n equals a,t,g, or c
  misc feature (489): n equals a,t,g, or c
  misc feature (519): n equals a,t,g, or c
  misc feature (526): n equals a,t,g, or c
ggcagagctttttcctcctcggctgcggccgttgtcctcggagcgcggtccctgtattggtctcctgctcctagaggttgagaacaaaaacatgcacctggagtttccccggagccctctgcgtggttgagcttcggtggaatttcggggctcttggctgccagcgcgcttgcctggtagcaacagaaaccagtcctgctcgcctccgtggacatttcattaccatccagaagtgtctcccactgaaggcatccgtggttgtttttaagccacaaaaaagccacanccaagatcacntgacaaccaccctgacaagtgttccatgatgttgggnccngagggaggtgaaggtttttgtggtcaagttccttggnctgccctgtncccgtttttttgaggacgtgcanaanttcccttttgactgaangnttcaagttggggccccaaggttccatttaatnacattgggggggcaagcaanattggtgnggtttttttgaattggttcaaaggtgtttnaaaatgnccc

SEQ ID NO: 919 - DNA, 238 bp, Homo sapiens
  misc feature (1): n equals a,t,g, or c
  misc feature (26): n equals a,t,g, or c
  misc feature (53): n equals a,t,g, or c
  misc feature (88): n equals a,t,g, or c
  misc feature (94): n equals a,t,g, or c
  misc feature (113): n equals a,t,g, or c
  misc feature (134): n equals a,t,g, or c
  misc feature (156): n equals a,t,g, or c
  misc feature (178): n equals a,t,g, or c
  misc feature (179): n equals a,t,g, or c
  misc feature (215): n equals a,t,g, or c
  misc feature (230): n equals a,t,g, or c
nagccctgcggatggtcctccatggntccctagtgccctggagaggaggtgtntagtgaaagagtagtcctgggaagatgggcctctntgaagnagccacggggacagcatcntgcagatggtcctggcccttntcccaccgacctgtctacaagnactgtgcctcgtggaccctccnntctggcacaggaagctggaccctaaagtcccttgtnccaccggccaggaantggtagcc

SEQ ID NO: 920 - DNA, 442 bp, Homo sapiens
  misc feature (262): n equals a,t,g, or c
  misc feature (268): n equals a,t,g, or c
  misc feature (303): n equals a,t,g, or c
  misc feature (382): n equals a,t,g, or c
  misc feature (385): n equals a,t,g, or c
ggcacgagagattaagttaggacaagaagcaagagttcaaggatagaaggcctactgaagctcgagtgatttgagaaaactttacaaaggtggaaaatctacgtgggcctccgaaagtcagatttgacaagatcaaagctgcaggaaaatggacagtgaggttcagagagatggaaggatcttggatttgattgatgatgcttggcgagaagacaagctgccttatgaggatgtcgcaataccactgaatgagcttcctgancctgancaagacaatggtggcaccacagatctgtcaaagancaagaaatgaagtggacagacttagccttacagtacctccatgagaatgttccccccattggaaactgacgtttggctnctntcttgtggatggattttctcaaagtacacagataaagcatggttgtttcagtcgtcc

SEQ ID NO: 921 - DNA, 444 bp, Homo sapiens
  misc feature (302): n equals a,t,g, or c
  misc feature (378): n equals a,t,g, or c
  misc feature (430): n equals a,t,g, or c
  misc feature (440): n equals a,t,g, or c
caatggcgggcgcccctcccccagcctcgttgccgccttgcagtttgatctcagactgctgtgttagcaatcagcgagactccgtgggcataggaacctccgagccaggtgcgggatgtaatctcgtggtgcaccgttttttaagccagtccgaaaagcgcaatattcgggtgggagtgacccaattttccaggtgcgtccgtcacccctttctttgactcggaaagggaactccctgaccccttgcgcttcccaagtgaggcaatgctctccctgcttcggctcgcacacggtgcgcgcanccactgacctgtgcccactgtctggcactccctagttgagatgaaccggtacctcagatggaaatgcagaaatcanccgtcttctgcgtcactcatgctggagctgtagaccggagctgttcctaatncggcatttgntcct

SEQ ID NO: 922 - DNA, 394 bp, Homo sapiens
  misc feature (268): n equals a,t,g, or c
  misc feature (286): n equals a,t,g, or c
  misc feature (294): n equals a,t,g, or c
  misc feature (318): n equals a,t,g, or c
  misc feature (370): n equals a,t,g, or c
  misc feature (372): n equals a,t,g, or c
  misc feature (374): n equals a,t,g, or c
  misc feature (388): n equals a,t,g, or c
gaaccgggtagcttggccaggttgtgaggaaccgcagcgcgccgcaggaccgggccgctgagcctgcagccgccccgcgccgtgacctgcgaccctagaccccgactccctttggctcagcccgcgcgccccaggcccggcccgggcggcgcgacgggaggatgagcggcgggcggcggaaggaggagccgcctcagccgcagctggccaacggggccctcaaagtctccgtctggagtaaggtgctgcggacgacgcggcctgggangataagataattttaagngtgactantggttccgacaatattctgtgtcntggtgtcaatttgggattttccataacaggttcttggaatacagatttgctnanantcagatctgtactnaattca

SEQ ID NO: 923 - DNA, 352 bp, Homo sapiens
  misc feature (331): n equals a,t,g, or c
  misc feature (341): n equals a,t,g, or c
  misc feature (347): n equals a,t,g, or c
  misc feature (348): n equals a,t,g, or c
  misc feature (351): n equals a,t,g, or c
gcaaaaccccactctgcatcaactgaacgcaaatcagccactttaattaagctaagcccttactagaccaatgggacttaaacccacaaacacttagttaacagctaagcaccctaatcaactggcttcaatctacttctcccgccgccgggaaaaaaggcgggagaagccccggcaggtttgaagctgcttcttcgaatttgcaattcaatatgaaaatcacctcggagctggtaaaaagaggcctaacccctgtctttagatttacagtccaatgcttcactcagccattttacctcacccccaaaaaaaaaaaaaaaaaaaaaaaccncggggggggncccggnnccna

SEQ ID NO: 924 - DNA, 436 bp, Homo sapiens
  misc feature (368): n equals a,t,g, or c
  misc feature (433): n equals a,t,g, or c
  misc feature (435): n equals a,t,g, or c
  misc feature (436): n equals a,t,g, or c
ccactccaccttactaccagacaaccttagccaaaccatttacccaaataaagtataggcgatagaaattgaaacctggcgcaatagatatagtaccgcaagggaaagatgaaaaattataaccaagcataatatagcaaggactaacccctataccttctgcataatgaattaactagaaataactttgcaaggagagccaaagctaagacccccgaaaccagacgagctacctaagaacagctaaaagagcacacccgtctatgtagcaaaatagtgggaagatttataggtagaggcgacaaacctaccgagcctggtgatagctggttgtccaagatagaatcttagttcaactttaaatttgnccacagaaccctctaaatccccttgtaaatttaactggttagtccaaagagggacagctctttgngnn

SEQ ID NO: 925 - DNA, 439 bp, Homo sapiens
cccaaacccactccaccttactaccagacaaccttagccaaaccatttacccaaataaagtataggcgatagaaattgaaacctggcgcaatagatatagtaccgcaagggaaagatgaaaaattataaccaagcataatatagcaaggactaacccctataccttctgcataatgaattaactagaaataactttgcaaggagagccaaagctaagacccccgaaaccagacgagctacctaagaacagctaaaagagcacacccgtctatgtagcaaaatagtgggaagatttataggtagaggcgacaaacctaccgagcctggtgatagctggttgtccaagatagaatctttagttcaactttaaatttgcccacagaacctctaaatccccttgtaaatttaactggtaagtcccaaggaggacagtctttgg

SEQ ID NO: 926 - DNA, 183 bp, Homo sapiens
  misc feature (179): n equals a,t,g, or c
caatctatcaccctatagaagaactaatgttagtataagtaacatgaaaacattctcctccgcataagcctgcgtcagattaaaacactgaactgacaattaacagcccaatatctacaatcaaccaacaagtcattattaccctcactgtcaacccaacaaaaaaaaaaaaaaaaaanaaaa

SEQ ID NO: 927 - DNA, 432 bp, Homo sapiens
cggaagtggaggaaagatggaggaccatcagcacgtgcccatcgacatccagaccagcaagctgctcgattggctggtggacagaaggcactgcagcctgaaatggcagagtctggtgctgacgatccgcgagaagatcaatgctgccatccaggacatgccagagagcgaagagatcgcccagctgctgtctgggtcctacattcactactttcactgcctaagaatcctggaccttctcaaaggcacagaggcctccacgaagaatatttttggccgatactcttcacagcggatgaaggattggcaggagattatagctctgtatgagaaggacaacacctacttagtggaactctctagcctcctggttcggaatgtcaactatgagatcccctcactgaagaagcagattgccaagtgccagcagct

SEQ ID NO: 928 - DNA, 439 bp, Homo sapiens
  misc feature (86): n equals a,t,g, or c
  misc feature (413): n equals a,t,g, or c
  misc feature (415): n equals a,t,g, or c
  misc feature (439): n equals a,t,g, or c
agacaaccttagccaaaccatttacccaaataaagtataggcgatagaaattgaaacctggcgcaatagatatagtaccgcaaggnaaagatgaaaaattataaccaagcataatatagcaaggactaacccctataccttctgcataatgaattaactagaaataactttgcaaggagagccaaagctaagacccccgaaaccagacgagctacctaagaacagctaaaagagcacacccgtctatgtagcaaaatagtgggaagatttataggtagaggcgacaaacctaccgagcctggtgatagctggttgtccaagatagtatcttagttcaactttaaatttgcccacagaaccctctaaatccccttgtaaatttaactgttagtcccaagagggacagctctttngncactagggaaaaaccttgtagggn

SEQ ID NO: 929 - DNA, 433 bp, Homo sapiens
  misc feature (388): n equals a,t,g, or c
  misc feature (417): n equals a,t,g, or c
  misc feature (432): n equals a,t,g, or c
ctgcattcagcattttaaggatttatattcatagtcacgcgccgcttaaggaggattcattctgtgaaatgagttgttaggcagtttcattgtgcgagcatcatagggtgaacttacacaaacctaggttgcagagcctactgcacacctcggctgtgtggtctaacctgttgctcctggactgcaaacctgtacagcctgttactgtcctgaatactgcaggcagttagaacagagtggtacatagttgtgtttctaaacatatcggaacctagaaaaggtacagtagaaatacggtattacaatcttatgggaccactgtctgtgtgcggtctgttgttgactgaaatgttatgcagtacatgggctgccatgagattaccttganaattttgcctgatatgaaacctagatatnaccttaaatatgggna

SEQ ID NO: 930 - DNA, 390 bp, Homo sapiens
  misc feature (332): n equals a,t,g, or c
  misc feature (354): n equals a,t,g, or c
  misc feature (360): n equals a,t,g, or c
  misc feature (375): n equals a,t,g, or c
  misc feature (388): n equals a,t,g, or c
gtcccccactcggagctcctccagcccgcttcccgtatttgcagcatgtcccggcgttcacagagcttggctgcctcctctgtcccaggagagagatgcttagagctgtcctcccagggagtcatgtcagcctctagggtgtgcatgggagctgaggggacactcctgctgcctccctggagtggtaattaaccgggactttcctcctcccagaaccaacatcccgggtaacggttgggctgaaggacaggtgacgtgtccctaactcccccccttccctgcccgaggttccggcatccaacgtcttggcttcctggtcttcaagcaggacnaccgattggcttttctgaagangcaagnccttaacctggtaanttaaaacaaccanaa

SEQ ID NO: 931 - DNA, 320 bp, Homo sapiens
  misc feature (164): n equals a,t,g, or c
  misc feature (205): n equals a,t,g, or c
  misc feature (232): n equals a,t,g, or c
  misc feature (293): n equals a,t,g, or c
  misc feature (296): n equals a,t,g, or c
  misc feature (311): n equals a,t,g, or c
  misc feature (316): n equals a,t,g, or c
cggtacgcgtgggcggacgcgtgggcggacgcgtggggccatctcacctcttcattctcttgttacatttgaagcagttgatataatgggtttatactttaaaagatagacatggtgccatgaagttggggagttgggtgaattatcccattctagttacagangagctttccttaaatgccctttaacttctaggttttgttcnagaagttcattttctgagttaaaagtnattttcatatatgtttgggggaaaattaactcatcctcaaaaagaatccttattaggttanttnaactccttaaaactnaaccnaatc

SEQ ID NO: 932 - DNA, 265 bp, Homo sapiens
  misc feature (256): n equals a,t,g, or c
aaaaaagatatattaacagttttagaagtcagtagaataaaatcttaaagcactcataatatggcatccttcaatttctgtataaaagcagatctttttaaaaagatacttctgtaacttaagaaacctggcatttaaatcatattttgtctttaggtaaaagctttggtttgtgttcgtgttttgtttgtttcacttgtttccctcccagccccaaaccttttgttctctccgtgaaacttacctttcccttttnctttctctt

SEQ ID NO: 933 - DNA, 475 bp, Homo sapiens
  misc feature (5): n equals a,t,g, or c
  misc feature (6): n equals a,t,g, or c
  misc feature (12): n equals a,t,g, or c
  misc feature (37): n equals a,t,g, or c
  misc feature (49): n equals a,t,g, or c
  misc feature (102): n equals a,t,g, or c
  misc feature (463): n equals a,t,g, or c
gtggnngcgctnctagaactatggatcccccggctgncaggattacggncacgagcaagggcagtgttacacttatgaggaactgtctctagccatccaggnaagtactactgggtctgagggatggaaagttcttcctgctatgaatgagagtggactcttcccctcacccccaactgaaaccacaaacaaccagaatcttctggaattctgacttagagtcgttgttatagaagaccttgttgctatggaacatgaaactgtgtgtcagatggagagatccccttaacctaagagccttaaatagccctgaaagtacactgggacggtttgcgatggaattaaaattggaagtgatatttttaggtgctcttgaaagctttctggggactcaaaattatcaaaagtcagggacagtccggaggaagagcgtctgcaaaactgggttcctagaagtatagancggacttagctg

SEQ ID NO: 934 - DNA, 322 bp, Homo sapiens
ataaacaacatctccagacagatctacctgaccgacaaccctgaggcagtcgcgatcaagttgaatcagaccgctctgcaagcagtgactcccattacaagttttggaaaaaaacaagaaagctcatgccccagccagaacctgaaaaattcagagatggaaaatgaaaatgacaagattgttcccaaagcaacagccagtctacctgaagcagaggagctgatcgcgcctggaacgccgattcaattcgatattgtgcttcctgctacagaattccttgatcagaacagagggagcaggcgtaccaacccttttggtgaaa

SEQ ID NO: 935 - DNA, 378 bp, Homo sapiens
  misc feature (121): n equals a,t,g, or c
  misc feature (122): n equals a,t,g, or c
  misc feature (124): n equals a,t,g, or c
  misc feature (301): n equals a,t,g, or c
  misc feature (326): n equals a,t,g, or c
  misc feature (327): n equals a,t,g, or c
  misc feature (356): n equals a,t,g, or c
  misc feature (365): n equals a,t,g, or c
ggcagaggagaaactgtgtgtgaggggaagaggcctgtttcgctgtcgggtctctagttcttgcacgctctttaagagtctgcactggaggaactctgccattaccagctcccttcttgcnnangccggtgggaaacatacatttattcatgccagtctgttgcatgcaggctttttggcttcctaccttgcaacaaaatgaattgcaccaactccttagtgccgattccgcccacagagagtcctggagccacagtcttttttgctttgcattgtaggagagggactaagtgctagagantatgtcgttttccctgagctaaccnngagcgttcgtggaactgggatcaaactgntttcagggnaaaaggaaaaaaa

SEQ ID NO: 936 - DNA, 450 bp, Homo sapiens
  misc feature (172): n equals a,t,g, or c
  misc feature (202): n equals a,t,g, or c
  misc feature (230): n equals a,t,g, or c
  misc feature (295): n equals a,t,g, or c
  misc feature (304): n equals a,t,g, or c
  misc feature (307): n equals a,t,g, or c
  misc feature (384): n equals a,t,g, or c
  misc feature (396): n equals a,t,g, or c
  misc feature (401): n equals a,t,g, or c
  misc feature (418): n equals a,t,g, or c
  misc feature (438): n equals a,t,g, or c
ggtggtaagtggcttcgtggtctttatagctgttactcttttgtactttgtctttttcttttattttcttttgagcgattgtgcgaacatagcatagcacgcactatgccttctgtgttgtagctgcctggccagggcgactggcggataaggtcttgtgcgtggcctcgangcttaaaagtaacagtggggctttgtgaangacaaaatggcgatggcgggccgtgtangtcccccttcctatgatgaaagaccttttcacagacctgttactgaactccgtgaagataaatantctgaaganatnggccctgcaagcctcttgcttacccgtcctgttccaaaaaaatacgttttccaaaatgccctgaatttgaactaatntcttattgggcncccgntctgccagatttacccncactttggaacaaaaaaaanccttttgtttgc

SEQ ID NO: 937 - DNA, 209 bp, Homo sapiens
  misc feature (15): n equals a,t,g, or c
  misc feature (16): n equals a,t,g, or c
  misc feature (24): n equals a,t,g, or c
  misc feature (55): n equals a,t,g, or c
  misc feature (62): n equals a,t,g, or c
  misc feature (175): n equals a,t,g, or c
  misc feature (187): n equals a,t,g, or c
  misc feature (191): n equals a,t,g, or c
  misc feature (198): n equals a,t,g, or c
  misc feature (200): n equals a,t,g, or c
agtcttaagaccaannaagcacgnaagcgccgtgaagagcgcctccaggccaagnaggaggngatcatcaagactttatccaaggaggaagagaccaagaaataaaacctcccactttgtctgtacatactggcctctgtgattacatagatcagccattgaaaataaaacaagncttaatctgcanatangacaagnanaaaatttcg

SEQ ID NO: 938 - DNA, 437 bp, Homo sapiens
  misc feature (366): n equals a,t,g, or c
  misc feature (390): n equals a,t,g, or c
  misc feature (408): n equals a,t,g, or c
  misc feature (425): n equals a,t,g, or c
  misc feature (428): n equals a,t,g, or c
cagaactgatagaacaaacactactcttttgaatttgatggttcgtgtcctttaaagtgtttgaggacctatgcagagcctgtaacacttgggtagtacctgctaggacaatttcttggcaattgtcttactactagggatcagtaagatttagattctgagcccataatggcaacagccccctcacctatgggaagctgacttccctcagtcgggcacttctcatgggggctgaacatggttcctgccattctgttacccactctcccaggtgagccctggattggctcccagaaggccttgtaaaaatccatagccatcctgcaggcagtgggagcaacaggggctttcatagcttcatttccngtcttgcagacaaggaccctgggnaacatgtgctgctaatangataattactccgttgnccnaattaccag

SEQ ID NO: 939 - DNA, 450 bp, Homo sapiens
  misc feature (2): n equals a,t,g, or c
  misc feature (19): n equals a,t,g, or c
  misc feature (109): n equals a,t,g, or c
  misc feature (110): n equals a,t,g, or c
  misc feature (362): n equals a,t,g, or c
  misc feature (395): n equals a,t,g, or c
  misc feature (423): n equals a,t,g, or c
  misc feature (440): n equals a,t,g, or c
cngacgcgtgggtcgaccnacgcgtccgcccacgcgtccgcccacgcgtccgacgacagaagggtacggctgcgagaagacgcagaagggtacggctgcgagaagacgnnagaaggggcttttcacattcgggaaacgtcgggattaggtgaaagtacgtagttgtctttcgtaagtcaaaatgataattgggccgaaacttactgccttacctaaaaggcagcgcagtcaggatattggtaggtcgggggcggctttggaaacccttaagtttacaagcatgcgcggacttgagtgctcattaggtcgccgggcgtccacgtgcagccctggaccctgaaccccggcgtgcgttggccgtnggcctcggggaaaagttccgtgcactcggggantccggtgaagctgttcagccgtctgtgncatgtggccatcttgantctactctgt

SEQ ID NO: 940 - DNA, 233 bp, Homo sapiens
ggagcgcctgtgggagccctggagggaactttcccagtccccgaggcggatcgggtgttgcatccatggagcgagctgagagctcgagtacagaacctgctaaggccatcaaacctattgatcagaagtcagtccatcagatttgctctgggcaggtggtactgagtctaagcactgcggtaaaggagttagtagaaaacagtctggatgctggtgccactaatattgatcta

SEQ ID NO: 941 - protein, 238 aa, Homo sapiens
  SITE (202): Xaa equals any of the naturally occurring L-amino acids
  SITE (217): Xaa equals any of the naturally occurring L-amino acids
  SITE (228): Xaa equals any of the naturally occurring L-amino acids
HECACLPGYAGDGHQCTDVDECSENRCHPAATCYNTPGSFSCRCQPGYYGDGFQCIPDSTSSLTPCEQQQRHAQAQYAYPGARFHIPQCDEQGNFLPLQCHGSTGFCWCVDPDGHEVPGTQTPPGSTPPHCGPSPEPTQRPPTICERWRENLLEHYGGTPRDDQYVPQCDDLGHFIPLQCHGKSDFCWCVDKDGREVQGTGXPARHHPCVYTHRRSXHGPAHAPARCXPSICGQLPGA

SEQ ID NO: 942 - protein, 341 aa, Homo sapiens
RTNLKEASDIKLEPNTLNGYKSSVTEPCPDSGEQLQPAPVLQEEELAHETAQKGEAKCHKSDTGMSKKKSRQGKLVKQFAKIEESTPVHDSPGKDDAVPDLMGPHSDQGEHSGTVGVPVSYTDCAPSPVGCSVVTSDSFRTKDSFRTAKSKKKRRITRYDAQLILENNSGIPKLTLRRRHDSSSKTNDQENDGMNSSKISIKLSKDHDNDNNLYVAKLNNGFNSGSGSSSTKLKIQLKRDEENRGSYTEGLHENGVCCSDPLSLLESRMEVDDYSQYEEESTDDSSSSEGDEEEDDYDDDFEDDFIPLPPAKRLRLIVGKDSIDIDISSRRREDQSLRLNA

SEQ ID NO: 943 - protein, 196 aa, Homo sapiens
  SITE (1): Xaa equals any of the naturally occurring L-amino acids
  SITE (9): Xaa equals any of the naturally occurring L-amino acids
  SITE (187): Xaa equals any of the naturally occurring L-amino acids
XLLKVWRAXQVSVAYNSLDFEPEIFFALGSPIAMFLTIRGVDRIDENYSLPTCKGFFNIYHPLDPVAYRLEPMIVPDLDLKAVLIPHHKGRKRLHLELKESLSRMGSDLKQGFISSLKSAWQTLNEFARAHTSSTQLQEELEKVANQIKEEEEKQVVEAEKVVESPDFSKDEDYLGKVGKVKWRPPXLTTFSKKNQ

SEQ ID NO: 944 - protein, 97 aa, Homo sapiens
  SITE (41): Xaa equals any of the naturally occurring L-amino acids
PHGLRCPSCPQTAVSRRQARRMVTETSRRRRIQELEERRRXFVEACRAREAAFDAEYQRNPHRVDLDILTFTIALTASEVINPLIEELGCDKFINRE

SEQ ID NO: 945 - protein, 123 aa, Homo sapiens [sequence omitted]

SEQ ID NO: 946 - protein, 45 aa, Homo sapiens
GFLGLLFMPQATYPGESLPVLLHEFLSHRMHVPLHFVTSVSPTRQ

SEQ ID NO: 947 - protein, 160 aa, Homo sapiens
  SITE (27): Xaa equals any of the naturally occurring L-amino acids
  SITE (29): Xaa equals any of the naturally occurring L-amino acids
  SITE (56): Xaa equals any of the naturally occurring L-amino acids
  SITE (110): Xaa equals any of the naturally occurring L-amino acids
  SITE (132): Xaa equals any of the naturally occurring L-amino acids
  SITE (133): Xaa equals any of the naturally occurring L-amino acids
  SITE (147): Xaa equals any of the naturally occurring L-amino acids
  SITE (156): Xaa equals any of the naturally occurring L-amino acids
GPRRGPGPGGCAAPATEEQEAASSSSXLXEVTLGEVPAAESPDPPQSPQGASSLPXTMNYPLWSQSYEDSSNQEEEGPSTFPDLESEFQAALSRKVAKLVHFLLLKYRAXEPVTKAEMLGSVVGKLASTSFXXIFKQKLSDFLCNLXFWHSKLEWXVGPP

SEQ ID NO: 948 - protein, 53 aa, Homo sapiens
SNWIIDCNCLEIYHKNRLCFFGIAPNFSLLLRAAHAVLSSYWSQPLGEERNAW

SEQ ID NO: 949 - protein, 154 aa, Homo sapiens
WDYILCAGLREHEEGAICHTLEAEACTSAARLTVVGGGDGNCRSARVVEKLLQGFSGFACPAAPCLARGEGGATCGTLEAGACRWHGSAAHLAAVGGGDRDCSLTVVNLEIICLEALSLSWDLKRRGSPNSQQSNSKWCCKLNHTWTGHSSEDP

SEQ ID NO: 950 - protein, 442 aa, Homo sapiens
ARGTETCGLIQVTLLDTVELATYTVRTFALHKSGSSEKRELRQFQFMAWPDHGVPEYPTPILAFLRRVKACNPLDAGPMVVHCSAGVGRTGCFIVIDAMLERMKHEKTVDIYGHVTCMRSQRNYMVQTEDQYVFIHEALLEAATCGHTEVPARNLYAHIQKLGQVPPGESVTAMELEFKLLASSKAHTSRFISANLPCNKFKNRLVNIMPYELTRVCLQPIRGVEGSDYINASFLDGYRQQKAYIATQGPLAESTEDFWRMLWEHNSTIIVMLTKLREMGREKCHQYWPAERSARYQYFVVDPMAEYNMPQYILREFKVTDARDGQSRTIRQFQFTDWPEQGVPKTGEGFIDFIGQVHKTKEQFGQDGPITVHCSAGVGRTGVFITLSIVLERMRYEGVVDMFQTVKTLRTQRPAMVQTEDQYQLCYRAALEYLGSFDHYAT

SEQ ID NO: 951 - protein, 82 aa, Homo sapiens
NSKVGISRNCVQMHPVVALQEVCLMKLGKHFAIFPLAVFLCSLLPLFFPWFVIIRREVLQRLVAVKESFFNFYPRVSHFYSR

SEQ ID NO: 952 - protein, 475 aa, Homo sapiens
  SITE (465): Xaa equals any of the naturally occurring L-amino acids
  SITE (468): Xaa equals any of the naturally occurring L-amino acids
  SITE (469): Xaa equals any of the naturally occurring L-amino acids
LVLPLHAVEKTGRPGQPALKMPGKLRSDAGLESDTAMKKGETLRKQTEEKEKKEKPKSDKTEEIAEEEETVFPKAKQVKKKAEPSEVDMNSPKSKKAKKKEEPSQNDISPKTKSLRKKKEPIEKKVVSSKTKKVTKNEEPSEEEIDAPKPKKMKKEKEMNGETREKSPKLKNGFPHPEPDCNPSEAASEESNSEIEQEIPVEQKEGAFSNFPISEETIKLLKGRGVTFLFPIQAKTFHHVYSGKDLIAQARTGTGKTFSFAIPLIEKLHGELQDRKRGRAPQVLVLAPTRELANQVSKDFSDITKKLSVACFYGGTPYGGQFERMRNGIDILVGTPGRIKDHIQNGKLDLTKLKHVVLDEVDQMLDMGFADQVEEILSVAYKKDSEDNPQTLLFSATCPHWVFNVAKKYMKSTYEQVDLIGKKTQKTAITVEHLAIKCHWTQRAAVIGDVIRVYSGHQGRTIIFXETXXEAQELS

SEQ ID NO: 953 - protein, 259 aa, Homo sapiens
  SITE (115): Xaa equals any of the naturally occurring L-amino acids
HEAKWAREEEEAQRRLEENRLRMEEEAARLRHEEEERKRKALEVQRQKELMRQRQQQQEALRRLQQQQQQQQLAQMKLPSSSTWGQQSNTTACQSQATLSLAEIQKLEEERERQXREEQRRQQRELMKALQQQQQQQQQKLSGWGNVSKPSGTTKSLLEIQQEEARQMQKQQQQQQQHQQPNRARNNTHSNLHTSIGNSVWGSINTGPPNQWASDLVSSIWSNADTKNSNMGFWDDAVKEVGPRNSTNKNKNNAISVNL

SEQ ID NO: 954 - protein, 144 aa, Homo sapiens
  SITE (12): Xaa equals any of the naturally occurring L-amino acids
  SITE (17): Xaa equals any of the naturally occurring L-amino acids
  SITE (32): Xaa equals any of the naturally occurring L-amino acids
  SITE (107): Xaa equals any of the naturally occurring L-amino acids
  SITE (114): Xaa equals any of the naturally occurring L-amino acids
  SITE (130): Xaa equals any of the naturally occurring L-amino acids
  SITE (144): Xaa equals any of the naturally occurring L-amino acids
IVYVPSHLHHMXFELFXNAMRATVEHQENQPXLTPIEVIVALGKEDLTIKISDRGGGVPLRIIDRLFSYTYSTAPTPVMDNSRNAPLAGFGYGLPISRLYAKYFQGXLNLYSLXGYGTDAIIYLKALVTXCQFLVCMQSTFKEX

SEQ ID NO: 955 - protein, 243 aa, Homo sapiens
TRPRTRGLWRPGWRCVPFCGWRWIHPGSPTRAAERVEPFLRPEWSGTGGAERGLRWLGTWKRCSLRARHPALQPPRRPKSSNPFTRAQEEERRRQNKTTLTYVAAVAVGMLGASYAAVPLYRLYCQTTGLGGSAVAGHASDKIENMVPVKDRIIKISFNADVHASLQWNFRPQQTEIYVVPGETALAFYRAKNPTDKPVIGISTYNIVPFEAGQYFNKIQCFCFEEQRLNPQEEVGYASVFLH

SEQ ID NO: 956 - protein, 184 aa, Homo sapiens
  SITE (10): Xaa equals any of the naturally occurring L-amino acids
  SITE (12): Xaa equals any of the naturally occurring L-amino acids
  SITE (16): Xaa equals any of the naturally occurring L-amino acids
GLVVTLLTHXFXINSXNFCTSAKDAFVILVENALRVATINTVGDFMLFLGKVLIVCSTGLAGIMLLNYQQDYTVWVLPLIIVCLFAFLVAHCFLSIYEMVVDVLFLCFAIDTKYNDGSPGREFYMDKVLMEFVENSRKAMKEAGKGGVADSRELNRCFGSKFCLNLADGYGNPLTFQNNIYTHT

SEQ ID NO: 957 - protein, 124 aa, Homo sapiens
  SITE (119): Xaa equals any of the naturally occurring L-amino acids
SRSPVLDPSEPQPLAAMHVIKRDGRQERVMFDKITSRIQKLCYGLNMDFVDPAQITMKVIQGLYSGVTTVELDTLAAETAATLTTKHPDYAILAARIAVSNLHKETKKVFSDVMEDLYXLHKST

SEQ ID NO: 958 - protein, 117 aa, Homo sapiens
SIMFVALMKYFQEMCPGVALAMLTRPLVTQRALGPDGDLPLRFLYQALSSHGASGTSLLSWEKGNWLPRQVVESVAGTRLEAHLVVNRAQWGRLGMLWSMGLFPGECSGMSSQLLWC

SEQ ID NO: 959 - protein, 267 aa, Homo sapiens
SMPGWRLLTQVGAQVLGRLGDGLGAALGPGNRTHIWLFVRGLHGKSGTWWDEHLSEENVPFIKQLVSDEDKAQLASKLCPLKDEPWPIHPWEPGSFRVGLIALKLGMMPLWTKDGQKHVVTLLQVQDCHVLKYTSKENCNGKMATLSVGGKTVSRFRKATSILEFYRELGLPPKQTVKIFNITDNAAIKPGTPLYAAHFRPGQYVDVTAKTIGKGFQGVMKRWGFKGQPATHGQTKTHRRPGAVATGDIGRVWPGTKMPGKMGKCGE

SEQ ID NO: 960 - protein, 165 aa, Homo sapiens [sequence omitted]

SEQ ID NO: 961 - protein, 93 aa, Homo sapiens
  SITE (12): Xaa equals any of the naturally occurring L-amino acids
TATTEVEVLDMXVLPLVYILMNIDVNKKGKKQNTRFFPILMLAPSKSLPTRMNTFPKLNKFLFIKLRLKFVGLGSFLKPRACPLPTPPSFAPK

SEQ ID NO: 962 - protein, 173 aa, Homo sapiens
EPKAKPHRSRGSGTRAVRRRSCLQSAAEAAHGPDTPAARALQSLGHPVVGDLTYGEVSGREDRPFRMMLHAFYLRIPTDTECVEVCTPDPFLPSLDACWSPHTLLQSLDQLVQALRATPDPDPEDRGPRPGSPSALLPGPGRPPPPPTKPPETEAQRGPCLQWLSEWTLEPDS

SEQ ID NO: 963 - protein, 80 aa, Homo sapiens
  SITE (47): Xaa equals any of the naturally occurring L-amino acids
  SITE (48): Xaa equals any of the naturally occurring L-amino acids
  SITE (77): Xaa equals any of the naturally occurring L-amino acids
SSRGEPRAALLCKRSDVLLEPFRRGVMEKLQLGPEILQRENPRLIYXXLSGFGQSGKLLPVSWPRYQLFGFCSGGRXQHI

SEQ ID NO: 964 - protein, 89 aa, Homo sapiens
AEALGSPCFPQDLLLANRSSRQLLQCVSHPANRSVCISVKENSLVPPGSAWKLDANFYIAWQTDQQCQALICILHYPFTWFLALNGLQP

SEQ ID NO: 965 - protein, 323 aa, Homo sapiens
  SITE (218): Xaa equals any of the naturally occurring L-amino acids
GRASERASRQQAAGGRADGTEGGSERAVSKPARAVGSRGQPRFLRSLRPPPWSPQRLRCPEDRTRPGPAMASLLKVDQEVKLKVDSFRERITSEAEDLVANFFPKKLLELDSFLKEPILNIHDLTQIHSDMNLPVPDPILLTNSHDGLDGPTYKKRRLDECEEAFQGTKVFVMPNGMLKSNQQLVDIIEKVKPEIRLLIEKCNTVKMWVQLLIPRIEXGNNFGVSIQEETVAELRTVESEAASYLDQISRYYITRAKLVSKIAKYPHVEDYRRTVTEIDEKEYISLRLIISELRNQYVTLHDMILKNIEKIKRPRSSNAETLY

SEQ ID NO: 966 - protein, 314 aa, Homo sapiens
  SITE (39): Xaa equals any of the naturally occurring L-amino acids
  SITE (300): Xaa equals any of the naturally occurring L-amino acids
VSPQKAASLVRIRWRHVRPSPPSASRLRRLPPRHLTVAXRPRREGVGTGSRAVLCILATCGSKMSDIGDWFRSIPAITRYWFAATVAVPLVGKLGLISPAYLFLWPEAFLYRFQIWRPITATFYFPVGPGTGFLYLVNLYFLYQYSTRLETGAFDGRPADYLFMLLFNWICIVITGLAMDMQLLMIPLIMSVLYVWAQLNRDMIVSFWFGTRFKACYLPWVILGFNYIIGGSVINELIGNLVGHLYFFLMFRYPMDLGGRNFLSTPQFLYRWLPSRRGGVSGFGVPPASMRRAADQNGGXGRHNWGQGFRLGDQ

SEQ ID NO: 967 - protein, 181 aa, Homo sapiens
  SITE (163): Xaa equals any of the naturally occurring L-amino acids
  SITE (175): Xaa equals any of the naturally occurring L-amino acids
TSSDTLTVLSRARLGSLLWQNLGSQEVLVPGNSCFSGAGLYSLQPLALPSWNQGQRLSPTLVSIFQKTGNAVRAIGRLSSMAMISGLSGRKSSTGSPTSPLNAEKLESEEDVSQAFLEAVAEEKPHVKPYFSKTIRDLEVVEGSAARFDCKIEGYPDPEVVWXQRWTSSIRESRXFPDRLR

SEQ ID NO: 968 - protein, 291 aa, Homo sapiens
HGAGESEPSSRVPRRAASPGHVPRLRGTRPELRERRRVRRPRAPPAAAQAAQQKFHLVPSINTMSGSQELQWMVQPHFLGPSSYPRPLTYPQYSPPQPRPGVIRALGPPPGVRRRPCEQISPEEEERRRVRRERNKLAAAKCRNRRKELTDFLQAETDKLEDEKSGLQREIEELQKQKERLELVLEAHRPICKIPEGAKEGDTGSTSGTSSPPAPCRPVPCISLSPGPVLEPEALHTPTLMTTPSLTPFTPSLVFTYPSTPEPCASAHRKSSSSSGDPSSDPLGSPTLLAL

SEQ ID NO: 969 - protein, 313 aa, Homo sapiens
  SITE (35): Xaa equals any of the naturally occurring L-amino acids
  SITE (62): Xaa equals any of the naturally occurring L-amino acids
  SITE (121): Xaa equals any of the naturally occurring L-amino acids
  SITE (137): Xaa equals any of the naturally occurring L-amino acids
  SITE (312): Xaa equals any of the naturally occurring L-amino acids
  SITE (313): Xaa equals any of the naturally occurring L-amino acids
EEEKKDSGVASTEDSSSSHITAAAIAAKKHPFYTXPAVVMAHGEQPIPGLINYSHHSTDERXPDSIISRGVQVLPRDTASLSTTPSESPRAQATSRLSTASCPTPKVQSRCSSKENILRAXHSAVDITKVARRHRMXPFPLTSMDKAFITVLEMTPVLGTEIINYRDGMGRVLAQDVYAKDNLPPFPASVKDGYAVRAADGPGDRFIIGESQAGEQPTQTVMPGQVMRVTTGAPIPCGADAVVQVEDTELIRESDDGTEELEVRILVQARPGQDIRPIGHDIKRGECVLAKGTHMGPSEIGLLATVGVTEVXX

SEQ ID NO: 970 - protein, 42 aa, Homo sapiens
  SITE (17): Xaa equals any of the naturally occurring L-amino acids
HMKKQLLVPDYGHFHVXEFLKLSLLRMVLLPADSYLFVFSSF

SEQ ID NO: 971 - protein, 67 aa, Homo sapiens
QKDREIRIFCAESPKFPPECNLQLPYLLSHMPSNMLDWLIHRPTQNTNVTCSCSLVAICLFSMYPAW

SEQ ID NO: 972 - protein, 54 aa, Homo sapiens
IVFFFSLFYKCQFNSRALAQYFLMIFSPRKRRKSLLVTQLRCQTSSETCTVAAY

SEQ ID NO: 973 - protein, 102 aa, Homo sapiens
VVLFEHKLHFYFLMQRMNKLNTCFEDRSRCSVWHHVIICLFYNIHVSLRNHGRDVRAEYTQQMLKEKEGSVLQKKKKRTNRILTLLTFPNFPMLLVNIIIVS

SEQ ID NO: 974 - protein, 365 aa, Homo sapiens
  SITE (297): Xaa equals any of the naturally occurring L-amino acids
  SITE (316): Xaa equals any of the naturally occurring L-amino acids
  SITE (321): Xaa equals any of the naturally occurring L-amino acids
  SITE (335): Xaa equals any of the naturally occurring L-amino acids
  SITE (347): Xaa equals any of the naturally occurring L-amino acids
  SITE (363): Xaa equals any of the naturally occurring L-amino acids
GMKTNGGRCRVRALCWSRREWRGAGMAQKKYLQAKLTQFLREDRIQLWKPPYTDENKKVGLALKDLAKQYSDRLECCENEVEKVIEEIRCKAIERGTGNDNYRTTGIATIEVFLPPRLKKDRKNLLETRLHITGRELRSKIAETFGLQENYIKIVINKKQLQLGKTLEEQGVAHNVKAMVLELKQSEEDARKNFQLEEEEQNEAKLKEKQIQRTKRGLEILAKRAAETVVDPEMTPYLDIANQTGRSIRIPPSERKALMLAMGYHEKGRAFLKRKEYGIALPCLLDADKYFCECCRXLLDTVDNYAVLQLDIVWCXFRLEXLECLDDAEKKLNLXQKCFKNCYGENXQRLVHIKVCSWEFILXAR

SEQ ID NO: 975 - protein, 146 aa, Homo sapiens
RGCKREGLAMSSLIRRVISTAKAPGAIGPYSQAVLVDRTIYISGQIGMDPSSGQLVSGGVAEEAKQALKNMGEILKAAGCDFTNVVKTTVLLADINDFNTVNEIYKQYFKSNFPARAAYQVAALPKGSRIEIEAVAIQGPLTTASL

SEQ ID NO: 976 - protein, 80 aa, Homo sapiens
  SITE (22): Xaa equals any of the naturally occurring L-amino acids
  SITE (23): Xaa equals any of the naturally occurring L-amino acids
  SITE (38): Xaa equals any of the naturally occurring L-amino acids
  SITE (61): Xaa equals any of the naturally occurring L-amino acids
  SITE (71): Xaa equals any of the naturally occurring L-amino acids
SSELLLHSFLGSVSSQNHRYPXXSQTTALGEGTIRFTXGFHTLMLLAFNLTTLDCQVFTDXWTWIQDWECXGMVWQQCLL

SEQ ID NO: 977 - protein, 59 aa, Homo sapiens
TDDEFSQMTLRNCFTKNKVIYLLWEELPSFCFSSLPPFPCGCRARSVRSWFCPAMIRES

SEQ ID NO: 978 - protein, 203 aa, Homo sapiens
  SITE (188): Xaa equals any of the naturally occurring L-amino acids
LWELKKLSVHFHPSVALFAKTILQGNYIQYSGDPLQDFTLMRFLDRFVYRNPKPHKGKENTDSVVMQPKRKHFIKDIRHLPVNSKEFLAKEESQIPVDEVFFHRYYKKVAVKEKQKRDADEESIEDVDDEEFEELIDTFEDDNCFSSGKDDMDFAGNVKKRTKGAKDNTLDEDSEGSDDELGNLDDDXSFFREVWMMEEFAGS

SEQ ID NO: 979 - protein, 141 aa, Homo sapiens
AAGFGDFCLIAMSGRGKQGGKARAKAKSRSSRAGLQFPVGRVHRLLRKGNYAERVGAGAPVYLAAVLEYLTAEILELAGNAARDNKKTRIIPRHLQLAIRNDEELNKLLGRVTIAQGGVLPNIQAVLLPKKTESHHKAKGK

SEQ ID NO: 980 - protein, 111 aa, Homo sapiens
  SITE (35): Xaa equals any of the naturally occurring L-amino acids
GELSFFGRHPDVPREAAGAHGDRHASPWAFFLERXKAPRLTTRSHRLLSDVFAASWTPHRMLTTKTLQPWVARLDEMERGLFQTGQKGLNDFQCWEKGQASQITASNLVQN

SEQ ID NO: 981 - protein, 167 aa, Homo sapiens
  SITE (70): Xaa equals any of the naturally occurring L-amino acids
  SITE (162): Xaa equals any of the naturally occurring L-amino acids
WRMGFSRVLCFTNSRENSHRLFLLVQAFGGVDVAEFSSRYGPGQRRMILKQFEQGKIQLLISTDATARGXDVQGVELVVNYDAPQYLRTYVHRVGRTARAGKTGQAFTLLLKVQERRFLRMLTEAGAPELQRHELSSKLLQPLVPRYEEALSQLEESVKEEXKQRAA

SEQ ID NO: 982 - protein, 108 aa, Homo sapiens
ANEPQFLAVYKKSLNANEEFKGLFKEMKGFPNRMIYSEETNNGISETHNLKPNLENMLCTKTTASASSLILTFFNRYLLNCPVKRCHNAQYCKQQVCIHEAFIHSGVY

SEQ ID NO: 983 - protein, 150 aa, Homo sapiens
  SITE (150): Xaa equals any of the naturally occurring L-amino acids
FSLSLSMTPQLLLALVLWASCPPCSGRKGPPAALTLPRVQCRASRYPIAVDCSWTLPPAPNSTSPVSFIATYRLGMAARGHSWPCLQQTPTSTSCTITDVQLFSMAPYVLNVTAVHPWGSSSSFVPFITEHIIKPDPPEGVRLSPLAERX

SEQ ID NO: 984 - protein, 158 aa, Homo sapiens
RLCWVKTLQHLLLRSTHKDQVQHRGLGTSLASGPHLTVRQQLPSPAMCLLSGSSCLKLTSTFFPDGQVAEGPAISVACCHPVPPLASLSFAQKTNNHTYPNWDTTLQNADDPFWRKLSLELSELPGKQGIWPTSLTTAAPTSPRTGASALTEVGRPKT

SEQ ID NO: 985 - protein, 40 aa, Homo sapiens
RWGCPGWSQTPELKQCARLGFPKCWDYRRKPLHAAYPLPF

SEQ ID NO: 986 - protein, 63 aa, Homo sapiens [sequence omitted]

SEQ ID NO: 987 - protein, 90 aa, Homo sapiens
HHRINCVHLYHCFTSLWWIYMAKLCEEIGKKKLPLTKDMREQGVKSNPCDSSLSHTDRWYLPVSSTLFSLFKILFHASRFIFVLSTSLFL

SEQ ID NO: 988 - protein, 50 aa, Homo sapiens [sequence omitted]

SEQ ID NO: 989 - protein, 92 aa, Homo sapiens
RMKRSRRWSRYKALNAGRTSKRIHKGLVVRKGWLGKLPSLPLRWRARGVMTLMFILLAAMLWFVAAPVVTYILCALVVLLAAPVLNGRLYAR

SEQ ID NO: 990 - protein, 87 aa, Homo sapiens
  SITE (33): Xaa equals any of the naturally occurring L-amino acids
  SITE (35): Xaa equals any of the naturally occurring L-amino acids
SGLIPFPFQRIAKKKLTVEAGCSEVGCGVGGTXGXALWAGAGGFEGLSSTRAQRSCQWPVALPPFPERGSRGHPGRLGPGPPSALAS

SEQ ID NO: 991 - protein, 184 aa, Homo sapiens
  SITE (46): Xaa equals any of the naturally occurring L-amino acids
  SITE (151): Xaa equals any of the naturally occurring L-amino acids
FATDRFFKCWHNAQSSMREQPIFTTRAHVFQIDPNTKKNWMPASKXAVTVSYFYDVTRNSYRIISVDGAKVIINSTITPNMTFTKTSQKFGQWADSRANTVFGLGFSSEQQLTKFAEKFQEVKEAAKIAKDKTQEKIETSSNHSQASSVNXTDDEKASHAGPANTHLKSENDKLKIALTQSAPT

SEQ ID NO: 992 - protein, 66 aa, Homo sapiens
  SITE (22): Xaa equals any of the naturally occurring L-amino acids
PCHLQHEESLSGVKVNETNRDXRPGEILVTLLESCQSYTGVLLIQNNSNNPSVSYVYANFNKKKLD

SEQ ID NO: 993 - protein, 434 aa, Homo sapiens
  SITE (13): Xaa equals any of the naturally occurring L-amino acids
  SITE (25): Xaa equals any of the naturally occurring L-amino acids
  SITE (95): Xaa equals any of the naturally occurring L-amino acids
  SITE (99): Xaa equals any of the naturally occurring L-amino acids
SGPGVQWVQPACXLRPDRGAPTDGXGGALQAETPSSAESQEFWEVKRKEKLITNGTIFCFEMEPAVSEPMRDQVARTHLTEDTPKVNADIEKVNXNQAXRCTVIGGSGFLGQHMVEQLLARGYAVNVFDIQQGFDNPQVRFFLGDLCSRQDLYPALKGVNTVFHCASPPPSSNNKELFYRVNYIGTKNVIETCKEAGVQKLILTSSASVIFEGVDIKNGTEDLPYAMKPIDYYTETKILQERAVLGANDPEKNFLTTAIRPHGIFGPRDPQLVPILIEAARNGKMKFVIGNGKNLVDFTFVENVVHGHILAAEQLSRDSTLGGKAFHITNDEPIPFWTFLSRILTGLNYEAPKYHIPYWVAYYLALLLSLLVMVISPVIQLQPTFTPMRVALAGTFHYYSCERAKKAMGYQPLVTMDDAMERTVQSFRHLRRVK

SEQ ID NO: 994 - protein, 29 aa, Homo sapiens
  SITE (17): Xaa equals any of the naturally occurring L-amino acids
MLHGITSFILYKSIMCXELKTSLGNINSS

SEQ ID NO: 995 - protein, 175 aa, Homo sapiens
  SITE (27): Xaa equals any of the naturally occurring L-amino acids
  SITE (52): Xaa equals any of the naturally occurring L-amino acids
  SITE (75): Xaa equals any of the naturally occurring L-amino acids
  SITE (77): Xaa equals any of the naturally occurring L-amino acids
RGLVRGAMVGGMQEREPALTVKLRLFXPQPSTPAQTGSWALFCLSQPHSKPXPPAPPYCNSPHSHTRSPLPPTYXRXFSPLPSQLPAPSCFTKGEVPGHLRVSLCGAQNLQGPLSMPLVPWTVSLVHLLSPSILSQSTDFSHSAVSVQPYPRDLDAWPPNLALGYPDANQTPPSS

SEQ ID NO: 996 - protein, 218 aa, Homo sapiens
  SITE (42): Xaa equals any of the naturally occurring L-amino acids
  SITE (118): Xaa equals any of the naturally occurring L-amino acids
  SITE (172): Xaa equals any of the naturally occurring L-amino acids
  SITE (173): Xaa equals any of the naturally occurring L-amino acids
  SITE (182): Xaa equals any of the naturally occurring L-amino acids
TLSHQVTQQMNMLIGVELQRLLVCQVFLFIQLDTMHAQKLLXKMGGSAPPDSSWRGSLKVPYNVGPGFTGNFSTQKVKMHIHSTNEVTRIYNVIGTLRGAVEPDRYVILGGHRDSWVXGGIDPQSGAAVVHEIVRSFGTLKKEGWRPRRTILFASWDAEEFGLLGSTEWAEXXSRLLQERGXGFILNADSSIGRKLHSEELDCTPLDVQLGTQPYQRA

SEQ ID NO: 997 - protein, 119 aa, Homo sapiens
  SITE (8): Xaa equals any of the naturally occurring L-amino acids
GRRQPTPXTSPEPPRSSPRQTPAPGPAREKSAGKRGPDRGSPEYRQRRERNNIAVRKSRDKAKRRNQEMQQKLVELSAENEKLHQRVEQLTRDLAGLRQFFKQLPSPPFLPAAGTADCR

SEQ ID NO: 998 - protein, 101 aa, Homo sapiens
  SITE (18): Xaa equals any of the naturally occurring L-amino acids
  SITE (21): Xaa equals any of the naturally occurring L-amino acids
LVNGARKVTGQRTQMYRXDMXNNKNGVDQEIIFPPIKTDVITMDPKDNCSKDANDTLLLQLTNTSAYYMYLLLLLKSVVYFAIITCCLLRRTAFCCNGEKS

SEQ ID NO: 999 - protein, 68 aa, Homo sapiens
  SITE (67): Xaa equals any of the naturally occurring L-amino acids
GTSAGVNPYKCSQCEKSFSGKLRLLVHQRMHTREKPYECSECGKAFIRNSQLIVHQRTHSGEKPYGXQ

SEQ ID NO: 1000 - protein, 320 aa, Homo sapiens
  SITE (19): Xaa equals any of the naturally occurring L-amino acids
RPCERTVRPRHSGHSGPNXCCSCRCSSCTGEAAIAGRLRTAAAGARTAGAALRHLGAGQRELGPRLEETKWEVCQKSGEISLLKQQLKESQAELVQKGSELVALRVALREARATLRVSEGRARGLQEAARARELELEACSQELQRHRQEAEQLREKAGQLDAEAAGLREPPVPPATADPFLLAESDEAKVQRAAAGVGGSLRAQVERLRVELQRERRRGEEQRDSFEGERLAWQAEKEQVIRYQKQLQHNYIQMYRRNRQLEQELQQLSLELEARELADLGLAEQPPASAWRRSLLLRSRALSNQLCRELCQRGSSCRST

SEQ ID NO: 1001 - protein, 70 aa, Homo sapiens
GLCFLPWVGFSSMHVGCFSLNLIVCLVCFPPFPFLFKLIHRTQKFTRYEHLKKWNRENGTSHVIKINIVL

SEQ ID NO: 1002 - protein, 79 aa, Homo sapiens
  SITE (31): Xaa equals any of the naturally occurring L-amino acids
  SITE (69): Xaa equals any of the naturally occurring L-amino acids
IFYTILQWDRNCLTPAGVTPHEPQGSSVPKXKKGNRWPPPLPHSPGTQDCSLKVFEPPSFPFLLGGQGXLNSRALPVLP

SEQ ID NO: 1003 - protein, 158 aa, Homo sapiens
  SITE (90): Xaa equals any of the naturally occurring L-amino acids
IRHEGTLNQPLTKLDRSSEEPLGVLVNPNMYQSPPQWVDHTGAASQKKAFRSSGFGLEFNSFQHQLRIQDQEFQEGFDGGWCLSVHQPWXSLLVRGIKRVEGRSWYTPHRGRLWIAATAKKPSPQEVSELQATYRLLRGKDVEFPNDYPSVVFWAVWT

SEQ ID NO: 1004 - protein, 64 aa, Homo sapiens
  SITE (17): Xaa equals any of the naturally occurring L-amino acids
  SITE (44): Xaa equals any of the naturally occurring L-amino acids
  SITE (46): Xaa equals any of the naturally occurring L-amino acids
  SITE (49): Xaa equals any of the naturally occurring L-amino acids
AGTLTPAYCLKTSPTGXFMVSYPLPHIFLATRQETYLWHLQISXIXFWXFPCLAICFIEWVSET

SEQ ID NO: 1005 - protein, 67 aa, Homo sapiens
  SITE (44): Xaa equals any of the naturally occurring L-amino acids
SSKFRAINPISVIKSSTDNNEQLLKSNILSLFTNVSLSIGTFLXYLFACHYDQKKQKATQKGQPHSK

SEQ ID NO: 1006 - protein, 223 aa, Homo sapiens
  SITE (33): Xaa equals any of the naturally occurring L-amino acids
  SITE (43): Xaa equals any of the naturally occurring L-amino acids
LDKKRKKDMLNSKTKTQYFHQEKWIYVHKGSTXERHGYCTLGXAFNRLDFSTAILDSRRFNYVVRLLELIAKSQLTSLSGIAQKNFMNILEKVVLKVLEDQQNIRLIRELLQTLYTSLCTLVQRVGKSVLVGNINMWVYRMETILHWQQQLNNIQITRPAFKGLTFTDLPLCLQLNIMQRLSDGRDLVSLGQLPPTCTCSAKTGCCGRNSASTTSPSGRSAND

SEQ ID NO: 1007 - protein, 152 aa, Homo sapiens
FGTSFCWCYFQFYFQCHNRVIFKQLLQAKALQFLQIDSCRLGSVNENLSVLLMAKKFEIPVCPHAGGVGLCELVQHLIIFDYISVSASLENRVCEYVDHLHEHFKYPVMIQRASYMPPKDPGYSTEMKEESVKKHQYPDGEVWKKLLPAQEN

SEQ ID NO: 1008 - protein, 69 aa, Homo sapiens
  SITE (15): Xaa equals any of the naturally occurring L-amino acids
REEIMKGREYQEAGXWGPSQRLPNTGYSLAPDDSCSFQMQNAPSQDLQKSYPIIGLAQSSEPYHLKFQV

SEQ ID NO: 1009 - protein, 87 aa, Homo sapiens
  SITE (59): Xaa equals any of the naturally occurring L-amino acids
VIVNVLNYQLEGIFVLKVDIEEPKWMMGFGASSESMFPLKYFPKQWYTWLFYYEICICXVFLCEQCFSLSVTICKGKSTNIDYIAQN

SEQ ID NO: 1010 - protein, 164 aa, Homo sapiens
DHPAEELGQSICICHPRTLTMKTLLLLAVIMIFGLLQAHGNLVNFHRMIKLTTGKEAALSYGFYGCHCGVGGRGSPKDATDRCCVTHDCCYKRLEKRGCGTKFLSYKFSNSGSRITCAKQDSCRSQLCECDKAAATCFARNKTTYNKKYQYYSNKHCRGSTPRC

SEQ ID NO: 1011 - protein, 113 aa, Homo sapiens
  SITE (102): Xaa equals any of the naturally occurring L-amino acids
  SITE (106): Xaa equals any of the naturally occurring L-amino acids
  SITE (111): Xaa equals any of the naturally occurring L-amino acids
PTRPRRAAFPVWVPERTALLTCPLGAAPGSSREAPGIAGPPNSTAMSKLGKFFKGGGSSKSRAAPSPQEALVRLRETEEMLGKKQEYLENRIQREIALAKKXGTQXKRGIXTK

SEQ ID NO: 1012 - protein, 79 aa, Homo sapiens
LTDLPCNKIVFCEKQEMNNNSVGTPLQISQEIQKNCEQVAGFTILQDTASYSKFLQDNDAQLFTYLCLNIPISLTFILW

SEQ ID NO: 1013 - protein, 54 aa, Homo sapiens
  SITE (52): Xaa equals any of the naturally occurring L-amino acids
QDREGFGSGQAGDGYEHLSFETCRGGNEGRGPCVEVFIQEAVVPLGLNIASXRQ

SEQ ID NO: 1014 - protein, 95 aa, Homo sapiens
  SITE (45): Xaa equals any of the naturally occurring L-amino acids
  SITE (52): Xaa equals any of the naturally occurring L-amino acids
AGDLRAGSTLKRFGFPRPGWGERAGCPLDSPPPHLMSRPSAPWSXAIMPPWXGAKDIEGLLGAGGGRNLVAHSPLTSHPAAPTLMPAVNYAPLDL

SEQ ID NO: 1015 - protein, 132 aa, Homo sapiens
  SITE (131): Xaa equals any of the naturally occurring L-amino acids
QKRSENIKQVEVWSILSKMNISGSSCGSPNSADTSSDFKDLWTKLKECHDREVQGLQVKVTKLKQERILDAQRLEEFFTKNQQLREQQKVLHETIKVLEDRLRAGLCDRCAVTEEHMRKKQQEFENIPAAXS

SEQ ID NO: 1016 - protein, 43 aa, Homo sapiens
  SITE (5): Xaa equals any of the naturally occurring L-amino acids
  SITE (42): Xaa equals any of the naturally occurring L-amino acids
GGRFXVHRTPITHPASQVEGLQVRRCIPQGLMLSAIFIPRQXS

SEQ ID NO: 1017 - protein, 188 aa, Homo sapiens
  SITE (105): Xaa equals any of the naturally occurring L-amino acids
  SITE (180): Xaa equals any of the naturally occurring L-amino acids
  SITE (188): Xaa equals any of the naturally occurring L-amino acids
CRASFAGPAALQDRDWQRTVIAMNGIEVKLSVKFNSREFSLKRMPSRKQTGVFGVKIAVVTKRERSKVPYIVRQCVEEIERRGMEEVGIYRVSGVATDIQALKAXFDVNNKDVSVMMSEMDVNAIAGTLKLYFRELPEPLFTDEFYPNFAEGIALSDPVAKESCMLNLLLSLAGANLASXFLFLFGTX

SEQ ID NO: 1018 - protein, 424 aa, Homo sapiens
  SITE (25): Xaa equals any of the naturally occurring L-amino acids
  SITE (153): Xaa equals any of the naturally occurring L-amino acids
GTSVDEGSISPRTLSAIKRALDDDXDVKVCAGDDVQTGGPGAEEMRINSSTENSDEGLKVRDGKGIPFTATLASSSVNSAEEHVASTNEGREPTDSVPKEQMSLVHVGTEAFPISDESMIKDRKDRLPLESAVVRHSDAPGLPNGRELTPASXTCTNSVSKNETHAEVLEQQNELCPYESKFDSSLLSSDDETKCKPNSASEVIGPVSLQETSSIVSVPSEAVDNVENVVSFNAKEHENFLETIQEQQTTESAGQDLISIPKAVEPMEIDSEESESDGSFIEVQSVISDEELQAEFPETSKPPSEQGEEELVGTREGEAPAESESLLRDNSERDDVDGEPQEAEKDAEDSLHEWQDINLEELETLESNLLAQQNSLKAQKQQQERIAATVTGQMFLESQELLRLFGIPYIQAPMEAEAQCASWT

SEQ ID NO: 1019 - protein, 90 aa, Homo sapiens
  SITE (44): Xaa equals any of the naturally occurring L-amino acids
VLLITFLGEEKKCYSCKQMYSFQKEATFLLPSLFLVSSPRLAIXIGIVMASILSLLHPYLLLCDFAAPLIKEAEPPLPPIGAGFESNRMK

SEQ ID NO: 1020 - protein, 71 aa, Homo sapiens
  SITE (16): Xaa equals any of the naturally occurring L-amino acids
  SITE (44): Xaa equals any of the naturally occurring L-amino acids
TRPIRPPHQIPVDTLXHVINQTGGYSDGLGGNSLYSPHNLNANXGWQDATTPSSVTSPTEGPGSVHSDTSN

SEQ ID NO: 1021 - protein, 301 aa, Homo sapiens
PTPPTPIRTAAQRREIWDFPGQIDFFDPTFDYEMIFRGTGALIFVIDSQDDYMEALARLHLTVTRAYKVNTDINFEVFIHKVDGLSDDHKIETQRDIHQRANDDLADAGLEKIHLSFYLTSIYDHSIFEAFSKVVQKLIPQLPTLENLLNIFISNSGIEKAFLFDVVSKIYIATDSTPVDMQTYELCCDMIDVVIDISCIYGLKEDGAGTPYDKESTAIIKLNNTTVLYLKEVTKFLALVCFVREESFERKGLIDYNFHCFRKAIHEVFEVRMKVVKSRKVQNRLQKKKRATPNGTPRVLL

SEQ ID NO: 1022 - protein, 36 aa, Homo sapiens
  SITE (10): Xaa equals any of the naturally occurring L-amino acids
TANRGSSASXKADSGLAQSDGRDPPTLWGWSLHLAL

SEQ ID NO: 1023 - protein, 173 aa, Homo sapiens
IRQSSRERIWRPPLWILARPGSAVAVRAGFPTPCRPPSLSALSPSASQPCSRRRTGLSPGSWGWPPSTRSACFLTCLSSRSYRLQIGHFLCLVILVYCAEYINEAAAMNWRLFSKYQYFDSRGMFISIVFSAPLLVNAMIIVVMWVWKTLNVMTDLKNAQERRKEKKRRRKED

SEQ ID NO: 1024 - protein, 73 aa, Homo sapiens
  SITE (25): Xaa equals any of the naturally occurring L-amino acids
  SITE (34): Xaa equals any of the naturally occurring L-amino acids
  SITE (36): Xaa equals any of the naturally occurring L-amino acids
  SITE (41): Xaa equals any of the naturally occurring L-amino acids
AWGAARRGRQRPCPLLAGRTEFWPXCEGKAEACXGXWFKLXGQGKGRGEWFSRSRRLCSRWTLENKGESSREQ

SEQ ID NO: 1025 - protein, 171 aa, Homo sapiens
LLPETALLNMRAAPLLLARAASLSLGFLFLLFFWLDRSVLAKELKFVTLVFRHGDRSPIDTFPTDPIKESSWPQGFGQLTQLGMEQHYELGEYIRKRYRKFLNESYKHEQVYIRSTDVDRTLMSAMTNLAALFPPEGVSIWNPILLWQPIPVHTVPLSEDQLLYLTFQELP

SEQ ID NO: 1026 - protein, 238 aa, Homo sapiens
ANWDLEMILRCSSNDLELLQAEHGILKIGETNKFSGYPLYHSVYETYELVEKFYDPMFKYHLTVAQVRGGMVFELANSIVLPFDCRDYAVVLRKYADKIYSISMKHPQEMKTYSVSFDSLFSAVKNFTEIASKFSERLQDFDKSNPIVLRMMNDQLMFLERAFIDPLGLPDRPFYRHVIYAPSSHNKYAGESFPGIYDALFDIESKVDPSKAWGEVKRQIYVAAFTVQAAAETLSEVA

SEQ ID NO: 1027 - protein, 132 aa, Homo sapiens
GPTTTKFAARRQGVLLITMNVLLGSVVIFATFVTLCNASCYFIPNEGVPGDSTRKCMDLKGNKHPINSEWQTDNCETCTCYETEISCCTLVSTPVGYDKDNCQRIFKKEDCKYIVVEKKDPKKTCSVSEWII

SEQ ID NO: 1028 - protein, 116 aa, Homo sapiens
  SITE (41): Xaa equals any of the naturally occurring L-amino acids
  SITE (111): Xaa equals any of the naturally occurring L-amino acids
SLTSCILEILQSLSYSYQNSCRPLTPDSPCLQCPPACRGGXVTATLSHQLFSICRPSWGRVPSSCSPCLWEKSHVLFISPHCTLSLTLDYNSSEFDLHLLDKPGTVLGIMXTIRQI

SEQ ID NO: 1029 - protein, 216 aa, Homo sapiens
TLKSEEFQKRLHPYKDFIATLGKLSGLHGQDLFGIWSKVYDPLYCESVHNFTLPSWATEDTMTKLRELSELSLLSLYGIHKQKEKSRLQGGVLVNEILNHMKRATQIPSYKKLIMYSAHDTTVSGLQMALDVYNGLLPPYASCHLTELYFEKGEYFVEMYYRNETQHEPYPLMLPGCSPSCPLERFAELVGPVIPQDWSTECMTTNSHQGTEDSTD

SEQ ID NO: 1030 - protein, 41 aa, Homo sapiens
  SITE (10): Xaa equals any of the naturally occurring L-amino acids
HHAWLIFLIXIFSRDKVALCCPGWYGTPVLKRSSCLGFPKC

SEQ ID NO: 1031 - protein, 43 aa, Homo sapiens
  SITE (7): Xaa equals any of the naturally occurring L-amino acids
PGWSQSXGLRPSFHLILPKNWDYRHEQLHLVHMLLIVEEVKGQ

SEQ ID NO: 1032 - protein, 63 aa, Homo sapiens
  SITE (50): Xaa equals any of the naturally occurring L-amino acids
QGFWHQLEILWMDVLPWSFYFNVLTTYDSSICSINYIHYHSNSHHLICIXYLILPSNYGISDL

SEQ ID NO: 1033 - protein, 63 aa, Homo sapiens [sequence omitted]

SEQ ID NO: 1034 - protein, 113 aa, Homo sapiens
  SITE (16): Xaa equals any of the naturally occurring L-amino acids
  SITE (100): Xaa equals any of the naturally occurring L-amino acids
  SITE (105): Xaa equals any of the naturally occurring L-amino acids
VNLACGAPLKCEDLAXWLKIKLGFVLNILAGPIIHKKRGHSPFARLLNELHSFCTWKCLFSHKKNNSYNLISLVPYQQKKSQETIMKTLVSSLGDYIMLXSLIIXLYLNKYIF

SEQ ID NO: 1035 - protein, 143 aa, Homo sapiens
  SITE (23): Xaa equals any of the naturally occurring L-amino acids
  SITE (81): Xaa equals any of the naturally occurring L-amino acids
GLRDLDSNPRALSCYSGVSTVRXGPGALSHHLPRPRDHHPLKRGPSPLSTPSRDPALGCSRLTAHGVLFWATAARAPGRGXGTPENTPLFMVLCPFIRRLLKNWAVCKANPAPCPSRFSERGVPWEWSCSPHGSTTFPVPRCH

SEQ ID NO: 1036 - protein, 122 aa, Homo sapiens
  SITE (52): Xaa equals any of the naturally occurring L-amino acids
  SITE (57): Xaa equals any of the naturally occurring L-amino acids
  SITE (81): Xaa equals any of the naturally occurring L-amino acids
  SITE (86): Xaa equals any of the naturally occurring L-amino acids
EHIWLSIWDRPPRSCFTRIQRATCCVLLICLFLGANAVWYGAVGDSAYSTGXVSRLXPLSVDTVAVGLVSSVVVYPVYLAXLFLFXMSRSKVINTLADHRHRGTDFGGSPWLLIINCVSEKL

SEQ ID NO: 1037 - protein, 29 aa, Homo sapiens
TPGLKQSFCLGPPKCWDCGHELLCPASMF

SEQ ID NO: 1038 - protein, 104 aa, Homo sapiens
  SITE (88): Xaa equals any of the naturally occurring L-amino acids
  SITE (100): Xaa equals any of the naturally occurring L-amino acids
ETARGTGRNGLSALNHHKPWLRKGHASPSRRMTPIRDPQRRCMSILAPRAVMQPARSQGEGTQKPGMLAKGVKETFELFTACSNYVKXTPLNKIWSMFVXLYLI

SEQ ID NO: 1039 - protein, 156 aa, Homo sapiens
GHMELAMDNSYAFNQRSTCNGIPSEKKNNFLVSEDHGQKILSVLQNFREQNVFYDFKIIMKDEIIPCHRCVLAACSDFFRAMFEVNMKERDDGSVTITNLSSKAVKAFLDYAYTGKTKITDDNVEMFFQLSSFLQVSFLSKACSDFLIKSINLEKK

SEQ ID NO: 1040 - protein, 85 aa, Homo sapiens
  SITE (30): Xaa equals any of the naturally occurring L-amino acids
PSPCPCSCAWVRWPRRTPPSRTTRARTHQXRDMARYYSALRHYINLITRQRYGKRSSPETLISDLLMRESTENVPRTRLEDPAMW

SEQ ID NO: 1041 - protein, 234 aa, Homo sapiens
  SITE (64): Xaa equals any of the naturally occurring L-amino acids
LGQYQPAREEISKDLRATLNAFLYHMGQHSNKFMLVLASNLPEQFDCAINSRIDVMVHFDLPQXEERERLVRLHFDNCVLKPATEGKRRLKLAQFDYGRKCSEVARLTEGMSGREIAQLAVSWQATAYASKDGVLTEAMMDACVQDAVQQYRQKMRWLKAEGPGRGVEHPLSGVQGETLTSWSLATDPSYPCLAGPCTFRICSWMGTGLCPGPLSPRMSCGGGRPFCPPGHPLL

SEQ ID NO: 1042 - protein, 63 aa, Homo sapiens
  SITE (14): Xaa equals any of the naturally occurring L-amino acids
ANLMKCKVQAGMIXSVCKDKSFDDEESVDGNRPSSAASAFKVPALKHPEILPTVQGSWFSRWP

SEQ ID NO: 1043 - protein, 64 aa, Homo sapiens
QLRSRAGLLSSTVRARNWPQNPQSQPWGPLGPQTPVFSFCVASWFPGVLFYAASGVRSSAFNLF

SEQ ID NO: 1044 - protein, 97 aa, Homo sapiens [sequence omitted]

SEQ ID NO: 1045 - protein, 43 aa, Homo sapiens
TLIFPPLRIINFLSFYHICFRSFFFLKKSITDLAKVPFDQYPT

SEQ ID NO: 1046 - protein, 221 aa, Homo sapiens
  SITE (29): Xaa equals any of the naturally occurring L-amino acids
  SITE (182): Xaa equals any of the naturally occurring L-amino acids
  SITE (186): Xaa equals any of the naturally occurring L-amino acids
  SITE (209): Xaa equals any of the naturally occurring L-amino acids
  SITE (212): Xaa equals any of the naturally occurring L-amino acids
  SITE (214): Xaa equals any of the naturally occurring L-amino acids
RSGRLRLSLYCGAGQGVRAGRGTGTPAVXGRLEIMEGKWLLCMLLVLGTAIVEAHDGHDDDVIDIEDDLDDVIEEVEDSKPDTTAPPSSPKVTYKAPVPTGEVYFADSFDRGTLSGWILSKAKKDDTDDEIAKYDGKWEVEEMKESKLPGDKGLVLMSRAKHHAISAKLNKPFLFDTKPLIXQYEXNFQNGIECGGAYVKLLSKTPELXLDXVXRTINCLH

SEQ ID NO: 1047 - protein, 82 aa, Homo sapiens
GIPPHFCGFFPVVDDQGWNLQSMGPDFLPSSQIDSAASHLCSAPVALKCNRNHHPRTMGSMPVGKAQVRSLSSQHIAVAGTW

SEQ ID NO: 1048 - protein, 85 aa, Homo sapiens
  SITE (65): Xaa equals any of the naturally occurring L-amino acids
  SITE (66): Xaa equals any of the naturally occurring L-amino acids
  SITE (74): Xaa equals any of the naturally occurring L-amino acids
PGSPDQRPTPQGEFILCQQQSFPSSEASHPHPRRQGKQARGGQESSQLSEAAPPAPKHLPCSQLXXQLLPAAKXTAAFRLTSMPL

SEQ ID NO: 1049 - protein, 75 aa, Homo sapiens [sequence omitted]

SEQ ID NO: 1050 - protein, 43 aa, Homo sapiens
  SITE (11): Xaa equals any of the naturally occurring L-amino acids
  SITE (34): Xaa equals any of the naturally occurring L-amino acids
GKKIKKLASAXRGGSLPVIPALSAAEASGSLEVXSSKTSLGQT

SEQ ID NO: 1051 - protein, 341 aa, Homo sapiens
  SITE (101): Xaa equals any of the naturally occurring L-amino acids
GPQEMTAGGQAEAEGAGGEPGAARLPSRVARLLSALFYGTCSFLIVLVNKALLTTYGFPSPIFLGIGQMAATIMILYVSKLNKIIHFPDFDKKIPVKLFPXPLLYVGNHISGLSSTSKLSLPMFTVLRKFTIPLTLLLETIILGKQYSLNIILSVFAIILGAFIAAGSDLAFNLEGYIFVFLNDIFTAANGVYTKQKMDPKELGKYGVLFYNACFMIIPTLIISVSTGDLQQATEFNQWKNVVFILQFLLSCFLGFLLMYSTVLCSYYNSALTTAVVGAIKNVSVAYIGILIGGDYIFSLLNFVGLNICMAGGLRYSFLTLSSQLKPKPVGEENICLDLKS

SEQ ID NO: 1052 - protein, 85 aa, Homo sapiens [sequence omitted]

SEQ ID NO: 1053 - protein, 724 aa, Homo sapiens
  SITE (87): Xaa equals any of the naturally occurring L-amino acids
  SITE (680): Xaa equals any of the naturally occurring L-amino acids
VDSESASVVGKRPPFHGTPSTMSSPASTPSRRGSRRGRATPAQTPRSEDARSSPSQRRRGEDSTSTGELQPMPTSPGVDLQSPAAQXVLFSSPPQMHSSAIPLDFDVSSPLTYGTPSSRVEGTPRSGVRGTPVRQRPDLGSAQKGLQVDLQSDGAAAEDIVASEQSLGQKLVIWGTDVNVAACKENFQRFLQRFIDPLAKEEENVGIDITEPLYMQRLGEINVIGEPFLNVNCEHIKSFDKNLYRQLISYPQEVIPTFDMAVNEIFFDRYPDSILEHQIQVRPFNALKTKNMRNLNPEDIDQLITISGMVIRTSQLIPEMQEAFFQCQVCAHTTRVEMDRGRIAEPSVCGRCHTTHSMALIHNRSLFSDKQMIKLQESPEDMPAGQTPHTVILFAHNDLVDKVQPGDRVNVTGIYRAVPIRVNPRVSNVKSVYKTHIDVIHYRKTDAKRLHGLDEEAEQKLFSEKRVELLKELSRKPDIYERLASALAPSIYEHEDIKKGILLQLFGGTRKDFSHTGRGKFRAEINILLCGDPGTSKSQLLQYVYNLVPRGQYTSGKGSSAVGLTAYVMKDPETRQLVLQTGALVLSDNGICCIDEFDKMNESTRSVLHEVMEQQTLSIAKAGIICQLNARTSVLAAANPIESQWNPKKTTIENIQLPHTLLSRFDLIFLMLDPQDEAYXQASGSPPGRTVLPERGAGRGGAPGHGGAKGLHCLRAQHHHAAAK

SEQ ID NO: 1054 - protein, 52 aa, Homo sapiens
  SITE (14): Xaa equals any of the naturally occurring L-amino acids
  SITE (20): Xaa equals any of the naturally occurring L-amino acids
LLCFYEPRCSRKWXQRHASXRSPYPAFVPAVPKSLARILHLGKKVLNANVTP

SEQ ID NO: 1055 - protein, 221 aa, Homo sapiens
  SITE (205): Xaa equals any of the naturally occurring L-amino acids
  SITE (207): Xaa equals any of the naturally occurring L-amino acids
RRGFGGVRASEACGLRRRAGFGGVRASGAMGTPPGLQTDCEALLSRFQETDSVRFEDFTELWRNMKFGTIFCGRMRNLEKNMFTKEALALAWRYFLPPYTFQIRVGALYLLYGLYNTQLCQPKQKIRVALKDWDEVLKFQQDLVNAQHFDAAYIFRKLRLDRAFHFTAMPKLLSYRMKKKIHRAEVTEEFKDPSDRVMKLITSDXLXEMLNGHDHYQNMNM

SEQ ID NO: 1056 - protein, 59 aa, Homo sapiens
KAVRSMLLSSLRENFLNNTRKRKIGLFSLLVLSILSSLQGRVAKLWGLNPEGGLSGHQT

SEQ ID NO: 1057 - protein, 193 aa, Homo sapiens
  SITE (192): Xaa equals any of the naturally occurring L-amino acids
SLPWRVPRSMETFDPTELPELLKLYYRRLFPYSQYYRWLNYGGVIKNYFQHREFSFTLKDDIYIRYQSFNNQSDLEKEMQKMNPYKIDIGAVYSHRPNQHNTVKLGAFQAQEKELVFDIDMTDYDDVRRCCSSADICPKCWTLMTMAIRIIDRALKEDFGFKHRLWVYSGRRGVHCWVCDESVRNCLLQYVXG

SEQ ID NO: 1058 - protein, 55 aa, Homo sapiens
  SITE (51): Xaa equals any of the naturally occurring L-amino acids
DEDNEKEKRDSLGNEESVDKTACECVRSPRESLDDLFQICSPCAIASGLRXTWLN

SEQ ID NO: 1059 - protein, 205 aa, Homo sapiens
  SITE (128): Xaa equals any of the naturally occurring L-amino acids
  SITE (205): Xaa equals any of the naturally occurring L-amino acids
RVSLVVTETVDAGLFGEGIVESLIHAWEHLLLQPKTKGESANCEKYGKVIPASAVIFGMAVECAEIRRHHRVGIKDIAGIHLPTNVKFQSPAYSSVDTEETIEPYTTEKMSRVPGGYLALTECFEIMXVDFNNLQELKSLATKKPGKIGIPVIKEGILDAVVVWFVLQLDDEHSLSTSPNEETCWEQAVYPVHDLADYRIKRGDX

SEQ ID NO: 1060 - protein, 92 aa, Homo sapiens
  SITE (72): Xaa equals any of the naturally occurring L-amino acids
PVKVWEGLREKRSVFSSGSGSCKLHLPGALPLLYPFAVCPPPPGSWSPSCSNSFCSYSRGLLGLLSPVRLGXALGSWVSSTDHARPLRPQII

SEQ ID NO: 1061 - protein, 295 aa, Homo sapiens
  SITE (243): Xaa equals any of the naturally occurring L-amino acids
  SITE (277): Xaa equals any of the naturally occurring L-amino acids
AEAIPLADQPHLLQPNARKEDLFGRPSQGLYSSSASSGKCLMEVTVDRNCLEVLPTKMSYAANLKNVMNMQNRQKKEGEEQPVLPEETESSKPGPSAHDLAAQLKSSLLAEIGLTESEGPPLTSFRPQCSFMGMVISHDMLLGRWRLSLELFGRVFMEDVGAEPGSILTELGGFEVKESKFRREMEKLRNQQSRDLSLEVDRDRDLLIQQTMRQLNNHFGRRCATTPMAVHRVKVTFKDEPGXGSGVARSFYTAIAQAFLSNEKLPNLECIPKKKFXPPQKPKKKGPTPNHQRVF

SEQ ID NO: 1062 - protein, 35 aa, Homo sapiens
GEEHIPQEAPQGAETALIPADITEKQQSLFNFVTM

SEQ ID NO: 1063 - protein, 210 aa, Homo sapiens
QYFMTMDGDSSTTDASQLGISADYIGGSHYVIQPHDDTEDSMNDHEDTNGSKESFREQDIYLPIANVARIMKNAIPQTGKIAKDAKECVQECVSEFISFITSEASERCHQEKRKTINGEDILFAMSTLGFDSYVEPLKLYLQKFREAMKGEKGIGGAVTATDGLSEELTEEAFTNQLPAGLITTDGQQQNVMVYTTSYQQISGVQQIQFS

SEQ ID NO: 1064 - protein, 332 aa, Homo sapiens
  SITE (216): Xaa equals any of the naturally occurring L-amino acids
  SITE (315): Xaa equals any of the naturally occurring L-amino acids
  SITE (326): Xaa equals any of the naturally occurring L-amino acids
LRPSVYPVASSLPVPDLILRQRLLQDPVARPQAMAGPFSRLLSARPGLRLLALAGAGSLAAGFLLRPEPVRAASERRRLYPPSAEYPDLRKHNNCMASHLTPAVYARLCDKTTPTGWTLDQCIQTGVDNPGHPFIKTVGMVAGDEETYEVFADLFDPVIQERHNGYDPRTMKHTTDLDASKIRSGYFDERYVLSSRVRTGRSIRGLSLPPACTRAXRREVERVVVDALSGLKGDLAGRYYRLSEMTEAEQQQLIDDHFLFDKPVSPLLTAAGMARDWPDARGIWHNNEKSFLIWVNEEDHTRVISMEKGGNMKRXFERSAEASKRXRDYVGD

SEQ ID NO: 1065 - protein, 241 aa, Homo sapiens
SFFFKVSRSEASHRMILLNNSHKLLALYKSLARSIPESLKVYGSVYHINHGNPFNMEVLVDSWPEYQMVIIRPQKQEMTDDMDSYTNVYRMFSKEPQKSEEVLKNCEIVNWKQRLQIQGLQESLGEGIRVATFSKSVKVEHSRALLLVTEDILKLNASSKSKLGSWAETGHPDDEFESETPNFKYAQLDVSYSGLVNDNWKRGKNERSLHYIKRCIEDLPAACMLGPEEIPVSWVTMGPFL

SEQ ID NO: 1066 - protein, 142 aa, Homo sapiens
  SITE (7): Xaa equals any of the naturally occurring L-amino acids
  SITE (130): Xaa equals any of the naturally occurring L-amino acids
EVLRDCXSPNSISIMGLNTSRVAITLKPQDPMEQNVAELLQFLLVKDQSKYPIRESEMREYIVKEYRNQFPEILRRAAAHLECIFRFELRELDPEAHTYILLNKLGPVPFEGLEESPNGPKMGLLMMILXQIFLNGNQAKEA

SEQ ID NO: 1067 - protein, 111 aa, Homo sapiens
TRSAGSRGGAWTPAWQVPPRERGSRCISAAFITDLGLHQGTCRTALKTAESEEPSLGPGRPAVQLASRIPLPAPADDLFWRVENVLGFKVQSGFLSIHYSCLHSTNKSWER

SEQ ID NO: 1068 - protein, 59 aa, Homo sapiens
  SITE (23): Xaa equals any of the naturally occurring L-amino acids
LLYQSIEDSSYLLPVAQFRFWEXAEQVKHRKLKRRNPHFGPIFLLDYFLISILPIVLMF

SEQ ID NO: 1069 - protein, 55 aa, Homo sapiens
  SITE (19): Xaa equals any of the naturally occurring L-amino acids
CLAVRRHELRTVHHGSERXRNPSPIRTMTDILSRGPKSMISLAGGLPNPNMFPFK

SEQ ID NO: 1070 - protein, 369 aa, Homo sapiens
  SITE (27): Xaa equals any of the naturally occurring L-amino acids
  SITE (29): Xaa equals any of the naturally occurring L-amino acids
  SITE (36): Xaa equals any of the naturally occurring L-amino acids
  SITE (41): Xaa equals any of the naturally occurring L-amino acids
  SITE (293): Xaa equals any of the naturally occurring L-amino acids
DRSFLEDTTPARDEKKVGAKAAQQDSXSXGEALGGXPMVAXFQDDVDLEDQPRGSPPLPAGPVPSQDITLSSEEEAEVAAPTKGPAPAPQQCSEPETKWSSIPASKPRRGTAPTRTAAPPWPGGVSVRTGPEKRSSTRPPAEMEPGKGEQASSSESDPEGPIAAQMLSFVMDDPDFESEGSDTQRRADDFPVRDDPSDVTDEDEGPAEPPPPPKLPLPAFRLKNDSDLFGLGLEEAGPKESSEEGKEGKTPSKEKKKKKKKGKEEEEKAAKKKSKHKKSKDKEEGKEERRRRXQRPPRSRERTAADELEAFLGGGARAAATLGVATTRSSRPAWAVAALGRGACLSLPGEAFASVPSPLPLPRGCRVRF

SEQ ID NO: 1071 - protein, 209 aa, Homo sapiens
  SITE (179): Xaa equals any of the naturally occurring L-amino acids
  SITE (180): Xaa equals any of the naturally occurring L-amino acids
  SITE (189): Xaa equals any of the naturally occurring L-amino acids
  SITE (202): Xaa equals any of the naturally occurring L-amino acids
  SITE (208): Xaa equals any of the naturally occurring L-amino acids
ERLYPAVVVGGRAVEQQHRRGSREAGSARAEMWNLLHETDSAVATARRPRWLCAGALVLAGGFFLLGFLFGWFIKSSNEATNITPKHNMKAFLDELKAENIKKFLYNFTQIPHLAGTEQNFQLAKQIQSQWKEFGLDSVELAHYDVLLSYPNKTHPNYISIINEDGNEIFNTSLFEPPXXGYENGSDIXPPFSAFSPQGMPXGDLVYXN

SEQ ID NO: 1072 - protein, 135 aa, Homo sapiens
  SITE (87): Xaa equals any of the naturally occurring L-amino acids
  SITE (94): Xaa equals any of the naturally occurring L-amino acids
  SITE (113): Xaa equals any of the naturally occurring L-amino acids
LQGLLINPLTLSPSNTVSQSLFFWLGFYIKLSILSNDLSLLPFLLHIPIKTFFVFNSCHLDSRTSSIPHVCSLLCQPRPFLYPPAWXCCPLCSXLTRYKEHEDGYMRLQLVRXESVELTQQLLRQPQEGSGWERR

SEQ ID NO: 1073 - protein, 135 aa, Homo sapiens
  SITE (48): Xaa equals any of the naturally occurring L-amino acids
  SITE (127): Xaa equals any of the naturally occurring L-amino acids
PSDVNVMAESLKDMEADAQKLYQLIWRQFVACQMTPAKYDSTTLTVGXGDFRLKARGRILRFDGWTKVMPALRKGDEDRILPAVNKGDALTLVELTPAQHFTKPPARFSEASLVKELEKRGIGRPSXYASIISTI

SEQ ID NO: 1074 - protein, 410 aa, Homo sapiens
  SITE (14): Xaa equals any of the naturally occurring L-amino acids
  SITE (21): Xaa equals any of the naturally occurring L-amino acids
  SITE (177): Xaa equals any of the naturally occurring L-amino acids
  SITE (248): Xaa equals any of the naturally occurring L-amino acids
  SITE (300): Xaa equals any of the naturally occurring L-amino acids
  SITE (372): Xaa equals any of the naturally occurring L-amino acids
RNKREEKKAQNSEXRMKRAQXYDSSFPNWEFARMIKEFRATLECHPLTMTDPIEEHRICVCVRKRPLNKQELAKKEIDVISIPSKCLLLVHEPKLKVDLTKYLENQAFCFDFAFDETASNEVVYRFTARPLVQTIFEGGKATCFAYGQTGSGKTHTMGGDLSGKAQNASKGIYAMAXRDVFLLKNQPCYRKLGLEVYVTFFEIYNGKLFDLLNKKAKLRVLEDGKQQVQVVGLQEHLVNSADDVIKMXDMGSACRTSGQTFANSNSSRSHACFQIILRAKGRMHGKFSLVDLAGNERGAXTSSADRQTRMEGAEINKSLLALKECIRALGQNKAHTPFRESKLTQVLRDSFIGENSRTCMIATISPGISSCXIYFKHPEICRQGQGAEPPQWAQWRAVDSNGNRRDGSLL

SEQ ID NO: 1075 - protein, 196 aa, Homo sapiens
  SITE (83): Xaa equals any of the naturally occurring L-amino acids
  SITE (167): Xaa equals any of the naturally occurring L-amino acids
LPFFRLSFAFVLRGFRNTAQNYRENTPARALSRTRCAASVWLASSSQFPTHRLRSSNSHDICSTRRRIRCRVLARPFSSACCXHRCVTRNRRAEQHDVRFGELHQPYPQAGAAGVSRGRGEAAVGDRWEVGRPGLGGILGAGEEMRAPERPRVRRRRLEPSRCCGPXGPFHFACKTQIKTQCDYSELFCLKKNVRS

SEQ ID NO: 1076 - protein, 31 aa, Homo sapiens
QLTLNISLLLSLSLSFFFNMVKLDQGSEHRF

SEQ ID NO: 1077 - protein, 87 aa, Homo sapiens
NCPNPHLHKNLSPVHKADHEAIIFLEGFLACSPVASAALALCHSEPKGKVMEQHHICRLSVLFGEGKGRECRRMKKFLPTASILIFL

SEQ ID NO: 1078 - protein, 85 aa, Homo sapiens
  SITE (65): Xaa equals any of the naturally occurring L-amino acids
  SITE (78): Xaa equals any of the naturally occurring L-amino acids
PDQGGDEGILSSRTCRGTRQGPHPRGDPVARHIMGTAGWPQASAPLLPCRQGLLEPCAHPGLLRXQPCTESADVPCLXTRPLCPL

SEQ ID NO: 1079 - protein, 594 aa, Homo sapiens
  SITE (430): Xaa equals any of the naturally occurring L-amino acids
CCLRFSFTFTEMSYGEIEGKFLGPREEVTSEPRCKKLKSTTESYVFHNHSNADFHRIQEKTGNDWVPVTIIDVRGHSYLQENKIKTTDLHRPLHDEMPGNRPDVIESIDSQVLQEARPPLVSADDEIYSTSKAFIGPIYKPPEKKKRNEGRNEAHVLNGINDRGGQKEKQKFNSEKSEIDNELFQFYKEIEELEKEKDGFENSCKESEPSQEQFVPFYEGHNNGLLKPDEEKKDLSNKAMPSHCDYQQNLGNEPDKYPCNGQVIPTFCDTSFTSFRPEWQSVYPFIVPYGPPLPSLNYHLNIQRFSGPPNPPSNIFQAQDDSQIQNGYYVNNCHVNWNCMTFDQNNEYTDCSENRSSVHPSGNGCSMQDRYVSNGFCEVRERCWKDHCMDKHNGTDRFVNQQFQEEKLNKLQKLLILLRGLPGSGKTTLXRILLGQNRDGIVFSTDDYFHHQDGYRYNVNQLGDAHDWNQNRAKQAIDQGRSPVIIDNTNIQAWEMKPYVEVAIGKGYRVEFHEPETWWKFDPEELEKRNKHGVSRKKIAQMLDRYEYQMSISIVMNSVEPSHKSTQRPPPPQGRQRWGGSLGSHNRVCVTNNH

SEQ ID NO: 1080 - protein, 61 aa, Homo sapiens
  SITE (52): Xaa equals any of the naturally occurring L-amino acids
  SITE (55): Xaa equals any of the naturally occurring L-amino acids
  SITE (59): Xaa equals any of the naturally occurring L-amino acids
LHIKILQIEKYIKYAMGLTFYQNSHMISFISSGSFRVPIALPIFTYFINLHXGIXSLFXFF

SEQ ID NO: 1081 - protein, 302 aa, Homo sapiens
APPALLEAEVCLLRVGPEAWSFSASLTPVALGSALAYRSHGVLDPRLLVGCAVAVLAVHGAGNLVNTYYDFSKGIDHKKSDDRTLVDRILEPQDVVRFGVFLYTLGCVCAACLYYLSPLKLEHLALIYFGGLSGSFLYTGGIGFKYVALGDLIILITFGPLAVMFAYAIQVGSLAIFPLVYAIPLALSTEAILHSNNTRDMESDREAGIVTLAILIGPTFSYILYNTLLFLPYLVFSILATHCTISLALPLLTIPMAFSLERQFRSQAFNKLPQRTAKLNLLLGLFYVFGIILAPAGSLPKI

SEQ ID NO: 1082 - protein, 68 aa, Homo sapiens
  SITE (9): Xaa equals any of the naturally occurring L-amino acids
  SITE (58): Xaa equals any of the naturally occurring L-amino acids
  SITE (60): Xaa equals any of the naturally occurring L-amino acids
QDVSEMDVXFLLIQLSCYFSSGSCGKVLVWPTEYSHWINMKTILEELVQRGHEVTVVXIXGFYSCQCQ

SEQ ID NO: 1083 - protein, 85 aa, Homo sapiens
  SITE (1): Xaa equals any of the naturally occurring L-amino acids
XPPGGGRSRTSGSPGLQVRAIRLALEGVDVKLEQAARTLGAGRWRVFFTITLPLTLPGIIVGTVLAFARSLGEFGAHHLCVEHSW

SEQ ID NO: 1084 - protein, 166 aa, Homo sapiens
  SITE (116): Xaa equals any of the naturally occurring L-amino acids
  SITE (130): Xaa equals any of the naturally occurring L-amino acids
  SITE (131): Xaa equals any of the naturally occurring L-amino acids
  SITE (146): Xaa equals any of the naturally occurring L-amino acids
  SITE (159): Xaa equals any of the naturally occurring L-amino acids
  SITE (163): Xaa equals any of the naturally occurring L-amino acids
PPSASSVAGDLGRGTRTEVEARAARPGAESAPAAAMPDSWDKDVYPEPPRRTPVQPNPIVYMMKAFDLIVDRPVTLVREFIERQHAKNRYYYYHRQYRRVPDITECKEEDIMCIKXDQEIITLCRIGSKXXSRGKDRLPADCIKEXEQLPRWPRLPGTXIRTXGPT

SEQ ID NO: 1085 - protein, 392 aa, Homo sapiens
  SITE (386): Xaa equals any of the naturally occurring L-amino acids
MELVAGCYEQVLFGFAVHPEPEACGDHEQWTLVADFTHHAHTASLSAVAVNSRFVVTGSKDETIHIYDMKKKIEHGALVHHSGTITCLKFYGNRHLISGAEDGLICIWDAKKWECLKSIKAHKGQVTFLSIHPSGKLALSVGTDKTLRTWNLVEGRSAFIKNIKQNAHIVEWSPRGEQYVVIIQNKIDIYQLDTASISGTITNEKRISSVKFLSESVLAVAGDEEVIRFFDCDSLVCLCEFKAHENRVKDMFSFEIPEHHVIVSASSDGFIKMWKLKQDKKVPPSLLCEINTNARLTCLGVWLDKVADMKESLPPAAEPSPVSKEQSKIGKKEPGDTVHKEEKRSKPNTKKRGLTGDSKKATKESGLISTKKRKMVEMLEKKRKKXKIKTMQ

SEQ ID NO: 1086 - protein, 238 aa, Homo sapiens
  SITE (122): Xaa equals any of the naturally occurring L-amino acids
AGTMHGRLKVKTSEEQAEAKRLEREQKLKLYQSATQAVFQKRQAGELDESVLELTSQILGANPDFATLWNCRREVLQQLETQKSPEELAALVKAELGFLESCLRVNPKSYGTWHHRCWLLGXLPEPNWTRELELCARFLEVDERNFHCWDYRRFVATQAAVPPAEELAFTDSLITRNFSNYSSWHYRSCLLPQLHPQPDSGPQGRLPEDVLLKELELVQNASSLTPMTRVPGFITVGS

SEQ ID NO: 1087 - protein, 79 aa, Homo sapiens
  SITE (59): Xaa equals any of the naturally occurring L-amino acids
  SITE (78): Xaa equals any of the naturally occurring L-amino acids
LPIQISLELDRCFRGAALERGFGLCKGRKEVQKNGVGGSAGRLLKCGRWKLGGEIKGTXDQLVCSYQGDPFQSKSHMXV

SEQ ID NO: 1088 - protein, 257 aa, Homo sapiens
IPVHLVSSSSNLERFTSRRAPGVGLYNLKTLLFFSSVQWVLIPTMAITQFRLFKFCTCLATVFSFLKRLICRSGRGRKLSGDQITLPTTVDYSSVPKQTDVEEWTSWDEDAPTSVKIEGGNGNVATQQNSLEQLEPDYFKDMTPTIRKTQKIVIKKREPLNFGIPDGSTGFSSRLAATQDLPFIHQSSELGDLDTWQENTNAWEEEEDAAWQAEEVLRQQKLADREKRAAEQQRKKMEKEAQRLMKKEQNKIGVKLS

SEQ ID NO: 1089 - protein, 44 aa, Homo sapiens [sequence omitted]

SEQ ID NO: 1090 - protein, 96 aa, Homo sapiens
  SITE (23): Xaa equals any of the naturally occurring L-amino acids
  SITE (85): Xaa equals any of the naturally occurring L-amino acids
GRPACAREPGLEPYLQVPNLRLXSLSLPQPRTKTSPPEGLPQLRERSRSSLGPGCAPGAGSDVVSSPLRTGPARSSWPPSRAPSXPPSSTATTCRW

SEQ ID NO: 1091 - protein, 131 aa, Homo sapiens
  SITE (29): Xaa equals any of the naturally occurring L-amino acids
  SITE (38): Xaa equals any of the naturally occurring L-amino acids
  SITE (75): Xaa equals any of the naturally occurring L-amino acids
  SITE (78): Xaa equals any of the naturally occurring L-amino acids
KAKFNITGACLNDSDDDSPDLDLDGNESXLALLMSNGXTKRVKSLSKSRRTKIAKKVDKARLMAEQVMEDEFDLXSDXELQIDERLGKEKATLIIRPKFPRKLPRANLALTPTEFVNQEKLSLTLRRIYNR

SEQ ID NO: 1092 - protein, 158 aa, Homo sapiens
LRITVLLTSFLMVLGTGLRCIPISDLILKRRLIHGGQMLNGLAGPTVMNAAPFLSTTWFSADERATATAIASMLSYLGGACAFLVGPLVVPAPNGTSPLLAAESSRAHIKDRIEAVLYAEFGVVCLIFSATLAYFPPRPPLPPSVAAASQRELSEKRL

SEQ ID NO: 1093 - protein, 235 aa, Homo sapiens
RAAQLWVWEGVVQPPAAWGGPWSASRCQQGKGGVLENEGFIGLLREAPQPQTHHLAVDTCVSMWDLVLSIALSVGCTGAVPLIQSRIVGGWECEKHSQPWQVAVYSHGWAHCGGVLVHPQWVLTAAHCLKKNSQVWLGRHNLFEPEDTGQRVPVSHSFPHPLYNMSLLKHQSLRPDEDSSHDLMLLRLSEPAKITDVVKVLGLPPRSQHWGPPATPQAGAASNQRSSCAPGVFSV

SEQ ID NO: 1094 - protein, 128 aa, Homo sapiens
  SITE (3): Xaa equals any of the naturally occurring L-amino acids
  SITE (4): Xaa equals any of the naturally occurring L-amino acids
RRXXGRTDTSRSTSGEPKERDKEEGKDSKPRSLRFTWSMKTTSSMDPNDMMREIRKVLDANNCDYEQKERFLLFCVHGDARQDSLVQWEMEVCKLPRLSLNGVRFKRISGTSIAFKNIASKIANELKL

SEQ ID NO: 1095 - protein, 214 aa, Homo sapiens
  SITE (161): Xaa equals any of the naturally occurring L-amino acids
  SITE (198): Xaa equals any of the naturally occurring L-amino acids
  SITE (206): Xaa equals any of the naturally occurring L-amino acids
ILFSSLLTCNFCLPIPPSPLSFPERHLGSYLLDSENTSGALPRLPQTPKQPQKRSRAAFSHTQVIELERKFSHQKYLSAPERAHLAKNLKLTETQVKIWFQNRRYKTKRKQLSSELGDLEKHSSLPALKERPSPGPPWSPCITAILTTHTCTAWAVEPSFXVMPAQVTTIMIKNCLPQGVSMKSTRGQGQGARVCTPXLLEICVEXSDSSLVRQ

SEQ ID NO: 1096 - protein, 62 aa, Homo sapiens
IRHEKKERMKERKEKKERKEKGKKERKERKERKREKERRKRRKGIPGIYHCMSKGRVVDRHS

SEQ ID NO: 1097 - protein, 48 aa, Homo sapiens
  SITE (31): Xaa equals any of the naturally occurring L-amino acids
  SITE (32): Xaa equals any of the naturally occurring L-amino acids
  SITE (34): Xaa equals any of the naturally occurring L-amino acids
  SITE (35): Xaa equals any of the naturally occurring L-amino acids
  SITE (36): Xaa equals any of the naturally occurring L-amino acids
  SITE (37): Xaa equals any of the naturally occurring L-amino acids
KKHWGMLQDIGLGKDFLSNTLKGQATQAKMXXWXXXXLKNFYTAKETK

SEQ ID NO: 1098 - protein, 136 aa, Homo sapiens
  SITE (91): Xaa equals any of the naturally occurring L-amino acids
NIPLDSETHNYQIVNHDQKLLLITSTTPQWKKNRVTVYEYDTREDQWINIGTMLGLLQFDSGFICLCARVYPSCLEPGQSFITEEDDARSXSSTEWDLDGFSELDSESGSSSSFSDDEVWVQVAPQRNAQDQQGSL

SEQ ID NO: 1099 - protein, 37 aa, Homo sapiens [sequence omitted]

SEQ ID NO: 1100 - protein, 105 aa, Homo sapiens
  SITE (104): Xaa equals any of the naturally occurring L-amino acids
FGTRDTRVKERGHAVSEKLLLGWKGQLHKGCSCRGSPAARCLLTVPRLSPDTEGCKGSLFLLSGIGKLYHLSLPTLTSAPATLSLWLLLTFSPLIFSPDQVLGXS

SEQ ID NO: 1101 - protein, 93 aa, Homo sapiens
SGRTLVLRLAYVSRTVTTMAPEVLPKPRMRGLLARRLRNHMAVAFVLSLGVAALYKFRVADQRKKAYADFYRNYDVMKDFEEMRKAGIFQSVK

SEQ ID NO: 1102 - protein, 26 aa, Homo sapiens
FGTSAPPRPANFCIFGRDGVSSRWLG

SEQ ID NO: 1103 - protein, 51 aa, Homo sapiens [sequence omitted]

SEQ ID NO: 1104 - protein, 47 aa, Homo sapiens
  SITE (12): Xaa equals any of the naturally occurring L-amino acids
  SITE (21): Xaa equals any of the naturally occurring L-amino acids
  SITE (40): Xaa equals any of the naturally occurring L-amino acids
  SITE (45): Xaa equals any of the naturally occurring L-amino acids
KRYSVLILCKKXKSSNCFPMXKITMSCIMLLSFYVNISYXSSIKXIY

SEQ ID NO: 1105 - protein, 72 aa, Homo sapiens
  SITE (65): Xaa equals any of the naturally occurring L-amino acids
  SITE (69): Xaa equals any of the naturally occurring L-amino acids
LLKLCNLQNIAIKLHTMFSIILIDLPYKHLNKKYYLMIKKKKKKKKKKKKKKKREKKKKKKKKKXGGGXKKK

SEQ ID NO: 1106 - protein, 79 aa, Homo sapiens
  SITE (54): Xaa equals any of the naturally occurring L-amino acids
  SITE (57): Xaa equals any of the naturally occurring L-amino acids
  SITE (62): Xaa equals any of the naturally occurring L-amino acids
  SITE (68): Xaa equals any of the naturally occurring L-amino acids
  SITE (74): Xaa equals any of the naturally occurring L-amino acids
GLSHSNSSYLEPLGSDVDRANVKFTENTCVFRTLKGTIRACFPSLYMHIFGISXGLXDVVIXNTARMXAVLIHXQKRGG

SEQ ID NO: 1107 - protein, 91 aa, Homo sapiens
  SITE (41): Xaa equals any of the naturally occurring L-amino acids
  SITE (72): Xaa equals any of the naturally occurring L-amino acids
IIAALSPIQILPSDGKDQFSCGNSVADQAFLDSLSASTAQXSSSAASNNHQVRLTSSFWMWLALRKTERICXRLVMHYSYCHSPKAKTKSL

SEQ ID NO: 1108 - protein, 47 aa, Homo sapiens
  SITE (35): Xaa equals any of the naturally occurring L-amino acids
  SITE (39): Xaa equals any of the naturally occurring L-amino acids
  SITE (46): Xaa equals any of the naturally occurring L-amino acids
EVIKVMNTCQCSGFTPVLQHFGEAKAGRSFEPQDXGTTXGNIVRPXV

SEQ ID NO: 1109 - protein, 78 aa, Homo sapiens
  SITE (60): Xaa equals any of the naturally occurring L-amino acids
  SITE (62): Xaa equals any of the naturally occurring L-amino acids
  SITE (64): Xaa equals any of the naturally occurring L-amino acids
  SITE (66): Xaa equals any of the naturally occurring L-amino acids
  SITE (67): Xaa equals any of the naturally occurring L-amino acids
  SITE (75): Xaa equals any of the naturally occurring L-amino acids
  SITE (77): Xaa equals any of the naturally occurring L-amino acids
WNHLHDLRVSRDLLSRILKEHYKFREKINILIILKLRNFSSLRGHKVFVVYTSNKSSIFXNXWXEXXWYVKKRPXPXG

SEQ ID NO: 1110 - protein, 62 aa, Homo sapiens
  SITE (30): Xaa equals any of the naturally occurring L-amino acids
  SITE (41): Xaa equals any of the naturally occurring L-amino acids
TWSLHKIQKLRWAWWCVPIVPLLVGLRQEXHLSPGGRGYSXPRVHYCTPARARERDPVSINK

SEQ ID NO: 1111 - protein, 44 aa, Homo sapiens
FMNLFPGKPYDSTVKGVRIVKMVFSDQVCAHAWPWIDSEMRFFV

SEQ ID NO: 1112 - protein, 263 aa, Homo sapiens
  SITE (19): Xaa equals any of the naturally occurring L-amino acids
GRAIMAASRLELNLVRLLXRCEAMAAEKRDPDEWRLEKYVGALEDMLQALKVHASKPASEVINEYSWKVDFLKGMLQAEKLTSSSEKALANQFLAPGRVPTTARERVPATKTVHLQSRARYTSEMRSELLGTDSAEPEMDVRKRTGVAGSQPVSEKQSAAELDLVLQRHQNLQEKLAEEMLGLARSLKTNTLAAQSVIKKDNQTLSHSLKMADQNLEKLKTESERLEQHTQKSVNWLLWAMLIIVCFIFISMILFIRIMPKLK

SEQ ID NO: 1113 - protein, 40 aa, Homo sapiens
  SITE (1): Xaa equals any of the naturally occurring L-amino acids
  SITE (3): Xaa equals any of the naturally occurring L-amino acids
  SITE (4): Xaa equals any of the naturally occurring L-amino acids
  SITE (5): Xaa equals any of the naturally occurring L-amino acids
  SITE (37): Xaa equals any of the naturally occurring L-amino acids
XAXXXWPPPKGNKSWSSTAVAAALELVDPPGCRQKGXFKI

SEQ ID NO: 1114 - protein, 125 aa, Homo sapiens
  SITE (26): Xaa equals any of the naturally occurring L-amino acids
RKRLAFWTTGIRDWLTWRTHSVCAEXRALTSAEAEVGACPRGLTRFASRPQPLHLLKAQEMIRLKHPPILLFCLGWKTWPRSWRPLLHLPDSQESSDQSCRTLLLPLALLPFSSSWGPSLVPHSL

SEQ ID NO: 1115 - protein, 109 aa, Homo sapiens
IDKRVPCNQLKSVLCVCFVSGAEYDNLPTVPLFEVGLALESYCKCLACMIVPGHPTLEFAPSCFSEDAVNRFRFYCLWIWGVTVALFTFLIKIHMKTRKKWLFLPRLCT

SEQ ID NO: 1116 - protein, 42 aa, Homo sapiens
  SITE (2): Xaa equals any of the naturally occurring L-amino acids
  SITE (5): Xaa equals any of the naturally occurring L-amino acids
QXELXLKKKKKIICKINSGIVVLFKEMFCKLSSHYIIFIVLS

SEQ ID NO: 1117 - protein, 62 aa, Homo sapiens
  SITE (2): Xaa equals any of the naturally occurring L-amino acids
KXATPRPPGETRPRMPRLFLFHLLEFCLLLNQFSRAVAAKWKDDVIKLCGRELVRAQIAILG

SEQ ID NO: 1118 - protein, 80 aa, Homo sapiens
  SITE (45): Xaa equals any of the naturally occurring L-amino acids
  SITE (80): Xaa equals any of the naturally occurring L-amino acids
PSVEWEQGHSERAESPHPPTLQQAAAGRLVNCRAGTQQQAAGTPXLLQLMAVCLSQDLEKTRLVYERITIGTLFMSFMNX

SEQ ID NO: 1119 - protein, 73 aa, Homo sapiens
TQQSVPVIVHPGVALLIPSGMYLPSELHFFKMLWVVGWETILQPSSDLINSLRDCKAESTSGHSWETDPLVMK

SEQ ID NO: 1120 - protein, 77 aa, Homo sapiens
  SITE (40): Xaa equals any of the naturally occurring L-amino acids
  SITE (49): Xaa equals any of the naturally occurring L-amino acids
  SITE (53): Xaa equals any of the naturally occurring L-amino acids
  SITE (57): Xaa equals any of the naturally occurring L-amino acids
  SITE (58): Xaa equals any of the naturally occurring L-amino acids
  SITE (63): Xaa equals any of the naturally occurring L-amino acids
TSSSYSDKQDTPPHPTCSISLSPLPQTHLHCSSCRGSRKXILKITRVGXGAVXSGCXXQHFGXGPGKAVHFGVKGFL

SEQ ID NO: 1121 - protein, 66 aa, Homo sapiens
  SITE (2): Xaa equals any of the naturally occurring L-amino acids
PXLYYVKLPIKYFYDYRFCIFVYNYLKSFMLYLEFQPRNHTVLKFSWGLLLSLNHLLNIYLPKGDF

SEQ ID NO: 1122 - protein, 41 aa, Homo sapiens
  SITE (41): Xaa equals any of the naturally occurring L-amino acids
SQHFGNAEVSGSPEVRSSRPAWANMVKPHFLLKKKKLGGGX

SEQ ID NO: 1123 - protein, 45 aa, Homo sapiens
  SITE (12): Xaa equals any of the naturally occurring L-amino acids
  SITE (16): Xaa equals any of the naturally occurring L-amino acids
KKKKGCTKISFXQRLXKRKKKRNTCVLKTICIFSFLDHTVANYCY

SEQ ID NO: 1124 - protein, 227 aa, Homo sapiens
  SITE (27): Xaa equals any of the naturally occurring L-amino acids
  SITE (38): Xaa equals any of the naturally occurring L-amino acids
RLPRNITPEWLQPRRPGVPCFWIQFSXVHGFPKEWSCXFFGIVNILLKYGAQINELHLAYCLKYEKFSIFRYFLRKGCSLGPWNHIYEFVNHAIKAQAKYKEWLPHLLVAGFDPLILLCNSWIDSVSIDTLIFTLEFTNWKTLAPAVERMLSARASNAWILQQHIATVPSLTHLCRLEIRSSLKSERLRSDSYISQLPLPRSLHNYLLYEDVLRMYEVPELAAIQDG

SEQ ID NO: 1125 - protein, 74 aa, Homo sapiens
NVACNTVLPAKFSTFCNLFYFFGCKAFLLSIVILYMFCPSCIVMFQSIIQLWLLKSYSCEDLPLFLLDCFSVLY

SEQ ID NO: 1126 - protein, 44 aa, Homo sapiens
ISSTPSLTQILVFIMDFFFKLVYLILSFHFWQHMDDFIFNNHIS

SEQ ID NO: 1127 - protein, 38 aa, Homo sapiens
  SITE (11): Xaa equals any of the naturally occurring L-amino acids
  SITE (15): Xaa equals any of the naturally occurring L-amino acids
  SITE (35): Xaa equals any of the naturally occurring L-amino acids
LSPFEASTDWXKQIXKWDVTGLISTNRLFTTPSWXPVS

SEQ ID NO: 1128 - protein, 70 aa, Homo sapiens
GTECTHGKKPCFVFCSLFFLSPFLSFMAGDMIYCSHPSWGLIHHTRVARRLWQQLFALNQTEKLSIIKGR

SEQ ID NO: 1129 - protein, 50 aa, Homo sapiens
HLPLSETHSPILNAYAVGYHLPLEVLEAISCRSRVAMGLNYYYPPKMLCL

SEQ ID NO: 1130 - protein, 76 aa, Homo sapiens [sequence omitted]

SEQ ID NO: 1131 - protein, 121 aa, Homo sapiens
TPYYLRVRRKNPVTSTYSKMSLQLYQVDSRTYLLDFRSIDDEITEAKSGTATPQRSGSVSNYRSCQRSDSDAEAQGKSSEVSLTSSVTSLDSSPVDLTPRPGSHTIEFFEMCANLIKILAQ

SEQ ID NO: 1132 - protein, 63 aa, Homo sapiens
  SITE (60): Xaa equals any of the naturally occurring L-amino acids
  SITE (61): Xaa equals any of the naturally occurring L-amino acids
  SITE (63): Xaa equals any of the naturally occurring L-amino acids
KTRGKLDKEPRPTGVCCLQETHLTCGGIHRLKIKEWRKIFQANGKQKKAGVALLLSDKTXXAX

SEQ ID NO: 1133 - protein, 46 aa, Homo sapiens
  SITE (46): Xaa equals any of the naturally occurring L-amino acids
PSQVSLNHPDDLPVERSYPSQVYFLMRTGHSWDDLPAERSDIFWVX

SEQ ID NO: 1134 - protein, 65 aa, Homo sapiens
  SITE (20): Xaa equals any of the naturally occurring L-amino acids
NSAREVIYMIHSQELLDRKXQGPQPLCPLYPQMALGINSSGIALKNSASCFAECHGHVILRSHNT

SEQ ID NO: 1135 - protein, 30 aa, Homo sapiens
  SITE (26): Xaa equals any of the naturally occurring L-amino acids
SCVRGNLEPYINTYIIKGKILKVNGXKASI

SEQ ID NO: 1136 - protein, 51 aa, Homo sapiens
  SITE (16): Xaa equals any of the naturally occurring L-amino acids
PESRHILVCTQLWAKXRWRHLSSHAELHSRLRTWVGSSKVIAKAPLSGGYT

SEQ ID NO: 1137 - protein, 48 aa, Homo sapiens
  SITE (25): Xaa equals any of the naturally occurring L-amino acids
  SITE (26): Xaa equals any of the naturally occurring L-amino acids
  SITE (42): Xaa equals any of the naturally occurring L-amino acids
SRLSFQDLAPALGMVGGKAKNLGSXXPWALKNVVLFKEQGSXQGCFWG

SEQ ID NO: 1138 - protein, 53 aa, Homo sapiens
  SITE (10): Xaa equals any of the naturally occurring L-amino acids
  SITE (53): Xaa equals any of the naturally occurring L-amino acids
KMCLFQLSQXGNVTGIRWVKARDAARHSTVHRTTPTTKNYLAQNVNNAEVEKX

SEQ ID NO: 1139 - protein, 86 aa, Homo sapiens
  SITE (17): Xaa equals any of the naturally occurring L-amino acids
  SITE (54): Xaa equals any of the naturally occurring L-amino acids
IGFGHDTDFLEARCCFXSGMGVHDCPEQPRSQFFRRLSAISAQAFTGQGQKQLXGVGGASSTAAWPQEIGCSSSSACGMVRNNLGG

SEQ ID NO: 1140 - protein, 93 aa, Homo sapiens
  SITE (12): Xaa equals any of the naturally occurring L-amino acids
IKKYIFHFYFIXNHNYLLRRCMHLLDTVQLLTWNEIGHCCPHFLLHVGVHIVLDFLSDGLENPVSQKYEIIRRIIVQSYVERMNYLTSSSRDV

SEQ ID NO: 1141 - protein, 63 aa, Homo sapiens
  SITE (56): Xaa equals any of the naturally occurring L-amino acids
  SITE (60): Xaa equals any of the naturally occurring L-amino acids
KIIIFSVVHNNVLNILLIKGAMSLCMVLNVSCVPFAQLRILQLGFNEWGHGIIMGXCKKXKRG

SEQ ID NO: 1142 - protein, 57 aa, Homo sapiens
  SITE (49): Xaa equals any of the naturally occurring L-amino acids
  SITE (56): Xaa equals any of the naturally occurring L-amino acids
FCVELISQCRGKNSLGSSLDITVHRASHQDDPTFYGGPGIGSPEPITQXPSDGWGXW

SEQ ID NO: 1143 - protein, 203 aa, Homo sapiens
  SITE (36): Xaa equals any of the naturally occurring L-amino acids
  SITE (41): Xaa equals any of the naturally occurring L-amino acids
  SITE (107): Xaa equals any of the naturally occurring L-amino acids
  SITE (171): Xaa equals any of the naturally occurring L-amino acids
  SITE (174): Xaa equals any of the naturally occurring L-amino acids
  SITE (180): Xaa equals any of the naturally occurring L-amino acids
  SITE (184): Xaa equals any of the naturally occurring L-amino acids
  SITE (190): Xaa equals any of the naturally occurring L-amino acids
ALALCQCGVPACSHVPMWSARLLMCPCGVPACSHMXMRSAXLLTHAHVECPPAHTCPCGVPACSHTCPCGVPTCSCAHVECPPAHMCRCGVPPAHTRAHVECPPAHXCRCGVPACSHVPMRSARLLTRADAECPPAHTCPCGVPACSHVPTRSARLLTRADAECPPAHTCXRGXPACSHXPTRXARLLTXAHVECRLLTLPMW

SEQ ID NO: 1144 - protein, 62 aa, Homo sapiens
  SITE (40): Xaa equals any of the naturally occurring L-amino acids
KVLLPYLCSSFPMAEFCNYIQNIVYILFLKLYYIGWILLXWGTGAYIQGSFLSTCLSTICCV

SEQ ID NO: 1145 - protein, 105 aa, Homo sapiens
NESLTQFHATFCLFSKERLLGLSVTRHVWIASHIHIMPGSPQPTHVLEVATCQVSVFSLNSKWVNHMNSTGPCENGVKASFVPFSISLTHMCSLSTAEDRFVCAL

SEQ ID NO: 1146 - protein, 243 aa, Homo sapiens
  SITE (240): Xaa equals any of the naturally occurring L-amino acids
KETLETISNEEQTPLLKKINPTESTSKAEENEKVDSKVKAFKKPLSVFKGPLLHISPAEELYFGSTESGEKKTLIVLTNVTKNIVAFKVRTTAPEKYRVKPSNSSCDPGASVDIVVSPHGGLTVSAQDRFLIMAAEMEQSSGTGPAELTQFWKEVPRNKVMEHRLRCHTVESSKPNTLTLKDNAFNMSDKTSEDICLQLSRLLESNRKLEDQVQRCIWFQQLLLSLTMLLLAFVTSFFYXLYS

SEQ ID NO: 1147 - protein, 58 aa, Homo sapiens
SVKMMYCILKYSNCAFLYHLQYEKCQYLVPFSGTIRFLLTLFSPLTHVISHSNQESRE

SEQ ID NO: 1148 - protein, 73 aa, Homo sapiens
  SITE (1): Xaa equals any of the naturally occurring L-amino acids
  SITE (2): Xaa equals any of the naturally occurring L-amino acids
XXNGLGSVKDGEPHFVVVHCTGYIKAWPQQVFPSQMMTQPEVFQEMLSMLGDQSNSYNNEEFPDLTMFPPFSE

SEQ ID NO: 1149 - protein, 79 aa, Homo sapiens
  SITE (15): Xaa equals any of the naturally occurring L-amino acids
  SITE (17): Xaa equals any of the naturally occurring L-amino acids
  SITE (50): Xaa equals any of the naturally occurring L-amino acids
  SITE (58): Xaa equals any of the naturally occurring L-amino acids
VKWVVSFNIQNNHMXYXLPLSFPFVQMRKVRLTEVNWPRVPQLVSAEVGXHNQICSAXNLCQISSKVLQRARHVYFIPI

SEQ ID NO: 1150 - protein, 138 aa, Homo sapiens
HSEIQSVCLTRLFDFKIFCRKCFENFEYLKMAGVVLHFASCSDTLFYLYRYSEFLFFSTCCTLSKAKRKLILGSRKAEAFGEMETRMCKNETTTSRIKKKKCQSSRVLSDVQEGGGIIFMEHILWNTAIRMSEKLICS

SEQ ID NO: 1151 - protein, 489 aa, Homo sapiens
  SITE (18): Xaa equals any of the naturally occurring L-amino acids
RPRTRAPRGARSACTRGXRRRPVPSLKVLSPFAVVQMRKKWKMGGMKYIFSLLFFLLLEGGKTEQVKHSETYCMFQDKKYRVGERWHPYLEPYGLVYCVNCICSENGNVLCSRVRCPNVHCLSPVHIPHLCCPRCPEDSLPPVNNKVTSKSCEYNGTTYQHGELFVAEGLFQNRQPNQCTQCSCSEGNVYCGLKTCPKLTCAFPVSVPDSCCRVCRGDGELSWEHSDGDIFRQPANREARHSYHRSHYDPPPSRQAGGLSRFPGARSHRGALMDSQQASGTIVQIVINNKHKHGQVCVSNGKTYSHGESWHPNLRAFGIVECVLCTCNVTKQECKKIHCPNRYPCKYPQKIDGKCCKVCPEELPGQSFDNKGYFCGEETMPVYESVFMEDGETTRKIALETERPPQVEVHVWTIRKGILQHFHIEKISKRMFEELPHFKLVTRTTLSQWKIFTEGEAQISQMCSSRVCRTELEDLVKVLYLERSEKGHC

SEQ ID NO: 1152 - protein, 48 aa, Homo sapiens
  SITE (42): Xaa equals any of the naturally occurring L-amino acids
INFLTIGFYGVGHNFWLYFKNFFLGGGVLGSGHQGRGVAWGXDPGASP

SEQ ID NO: 1153 - protein, 48 aa, Homo sapiens
TIVRDGSNDVICENSHHLPVRQNLLKPPESNLDYIRPFFTHKKILYGI

SEQ ID NO: 1154 - protein, 344 aa, Homo sapiens
  SITE (85): Xaa equals any of the naturally occurring L-amino acids
  SITE (88): Xaa equals any of the naturally occurring L-amino acids
  SITE (96): Xaa equals any of the naturally occurring L-amino acids
  SITE (140): Xaa equals any of the naturally occurring L-amino acids
  SITE (314): Xaa equals any of the naturally occurring L-amino acids
SKKLTRPLVMKTGRPAGKGSITISAEEIKDNRVVLFEMEARKLDNKDLFGKSDPYLEFHKQTSDGNWLMVHRTEVVKNNLNPVWXPFXISLNSLCXGDMDKTIKVECYDYDNDGSHDLIGTFQTTMTKLKEASRSSPVEXECINEKKRQKKKSYKNSGVISVKQCEITVECTFLDYIMGGCQLNFTVGVDFTGSNGDPRSPDSLHYISPNGVNEYLTALWSVGLVIQDYDADKMFPAFGFGAQIPPQWQVSHEFPMNFNPSNPYCNGIQGIVEAYRSCLPQIKLYGPTNFSPIINHVARFAAAATQQQTASQYXVLLIITDGVITDLDETRQAIVNASSCLCPS

SEQ ID NO: 1155 - protein, 120 aa, Homo sapiens
YFIEGLCAKNYAYLYIGQLSLIIYLLKLHVYHISLSGHIQCHVDVPLSFIEKLPHSPCLLFSAMPQGSELSTTDSCGFSEAAHCQGQAERGPACCGGCLAQMSIYLPPSHLASCPLDMCC

SEQ ID NO: 1156 - protein, 469 aa, Homo sapiens
GGWRWKLRESGAIAPRDSQSRPLQSLRQLALRVGVAPAAAMSGGVYGGDEVGALVFDIGSYTVRAGYAGEDCPKVDFPTAIGMVVERDDGSTLMEIDGDKGKQGGPTYYIDTNALRVPRENMEAISPLKNGMVEDWDSFQAILDHTYKMHVKSEASLHPVLMSEAPWNTRAKREKLTELMFEHYNIPAFFLCKTAVLTAFANGRSTGLILDSGATHTTAIPVHDGYVLQQGIVKSPLAGDFITMQCRELFQEMNIELVPPYMIASKEAVREGSPANWKRKEKLPQVTRSWHNYMCNCVIQDFQASVLQVSDSTYDEQVAAQMPTVHYEFPNGYNCDFGAERLKIPEGLFDPSNVKGLSGNTMLGVSHVVTTSVGMCDIDIRPGLYGSVIVAGGNTLIQSFTDRLNRELSQKTPPSMRLKLIANNTTVERRFSSWIGGSILASLGTFQQMWISKQEYEEGGKQCVERKCP

SEQ ID NO: 1157 - protein, 94 aa, Homo sapiens
  SITE (19): Xaa equals any of the naturally occurring L-amino acids
  SITE (49): Xaa equals any of the naturally occurring L-amino acids
TALCPRIHEVPLLEPLVCXKIAQERLTVLLFLEDCIITACQEGLICTWXRPGKAFTDEETEAQTGEGSWPRSPSKSVVEGISSQPGNSPSGTVV

SEQ ID NO: 1158 - protein, 114 aa, Homo sapiens
LSPQWTHLLVKGAVVLCGSQFTSFPKIQCDHPVNGHTSSEINFQNLCSSSYPLRVIMANKQKALVQAPPNTLNLNLNMLKFENKETFFISLSGLSLVLMGLLMAFQSVAEAIIF

SEQ ID NO: 1159 - protein, 155 aa, Homo sapiens
  SITE (43): Xaa equals any of the naturally occurring L-amino acids
  SITE (46): Xaa equals any of the naturally occurring L-amino acids
PWGAWRQGARAAQSPFSIPNSSSVPYGSQDSVHSSPEDGGGGXDRXGGTGGPRLVIGSLPAHLSPHMFGGFKCPVCSKFVSSDEMDLHLVMCLTKPRITYNEDVLSKDAGECAICLEELQQGDTIARLPCLCIYHKGCIDEWFEVNRSCPEHPSD

SEQ ID NO: 1160 - protein, 337 aa, Homo sapiens
  SITE (38): Xaa equals any of the naturally occurring L-amino acids
  SITE (46): Xaa equals any of the naturally occurring L-amino acids
  SITE (155): Xaa equals any of the naturally occurring L-amino acids
  SITE (169): Xaa equals any of the naturally occurring L-amino acids
CLGCKPDQPLRAEGRLLAPSGNPAPSPGSERLAGDDTXSAPAAPSXGCGKRRESDAGAGGERASVRTGSGRRGGANHGRGQRADPAEPPAAQRRRALPYRRHGGTASGKSSVCAKIVQLLGQNEVDYRQKQVVILSQDSFYRVLTSEQKAKALKXQFNFDHPDAFDNEXILKTLKEITEGKTVQIPVYDFVSHSRKEETVTVYPADVVLFEGILAFYSQEVRDLFQMKLFVDTDADTRLSRRVLRDISERGRDLEQILSQYITFVKPAFEEFCLPTKKYADVIIPRGADNLVAINLIVQHIQDILNGGPSKRQTNGCLNGYTPSRKRQASESSSRPH

SEQ ID NO: 1161 - protein, 330 aa, Homo sapiens
ARGMFGLGNEFKPLNVQEREAQFGTTAEIYAYREEQDFGIEIVKVKAIGRQRFKVLELRTQSDGIQQAKVQILPECVLPSTMSAVQLESLNKCQIFPSKPVSREDQCSYKWWQKYQKRKFHCANLTSWPRWLYSLYDAETLMDRIKKQLREWDENLKDDSLPSNPIDFSYRVAACLPIDDVLRIQLLKIGSAIQRLRCELDIMNKCTSLCCKQCQETEITTKNEIFSLSLCGPMAAYVNPHGYVHETLTVYKACNLNLIGRPSTEHSWFPGYAWTVAQCKICASHIGWKFTATKKDMSPQKFWGLTRSALLPTIPDTEDEISPDKVILCL

SEQ ID NO: 1162 - protein, 165 aa, Homo sapiens
  SITE (144): Xaa equals any of the naturally occurring L-amino acids
  SITE (148): Xaa equals any of the naturally occurring L-amino acids
  SITE (153): Xaa equals any of the naturally occurring L-amino acids
  SITE (165): Xaa equals any of the naturally occurring L-amino acids
CRKTAQPTAAEMKYKNLMARALYDNVPECAEELAFRKGDILTVIEQNTGGLEGWWLCSLHGRQGIVPGNRVKLLIGPMQETASSHEQPASGLMQQTFGQQKLYQVPNPTGLLPPRHPFLPKVPTLSLTQKIKGEIFTQRFPQLXAQRXTPKGXKGGVLFRVAPPX

SEQ ID NO: 1163 - protein, 195 aa, Homo sapiens
  SITE (186): Xaa equals any of the naturally occurring L-amino acids
FLNRELIVKSSMATGGGPFEDGMNDQDLPNWSNENVDDRLNNMDWGAQQKKANRSSEKNKKKFGVESDKRVTNDISPESSPGVGRRRTKTPHTFPHSRYMSQMSVPEQAELEKLKQRINFSDLDQRSIGSDSQGRATAANNKRQLSENRKPFNFLPMQINTNKEQRCILQVPQTEETVGFSTVLKXCFAFWFLSN

SEQ ID NO: 1164 - protein, 300 aa, Homo sapiens
RRPSARRELGKGRQRRRRQRQRQSPVPRPSDRPAGLGLAKPARRALPTPEPGRKSSDSSLASPGAALQTGPVVRGSGADPEAGFAQPPTRAGPLEGAFNSRTRQATMTENSTSAPAAKPKRAKASKKSTDHPKYSDMIVAAIQAEKNRAGSSRQSIQKYIKSHYKVGENADSQIKLSIKRLVTTGVLKQTKGVGASGSFRLAKSDEPKKSVAFKKTKKEIKKVATPKKASKPKKAASKAPTKKPKATPVKKAKKKLAATPKKAKKPKTVKAKPVKASKPKKAKPVKPKAKSSAKRAGKKK

SEQ ID NO: 1165 - protein, 150 aa, Homo sapiens
  SITE (115): Xaa equals any of the naturally occurring L-amino acids
STHASAHASGKQEIVDPPSKMEDGKPVWAPHPTDGFQMGNIVDIGPDSLTIEPLNQKGKTFLALINQVFPAEEDSKKDVEDNCSLMYLNEATLLHNIKVRYSKDRIYTYVANILXAVNPYFDIPKIYLQSIKSYQGKSLGTRPPPGLCNC

SEQ ID NO: 1166 - protein, 84 aa, Homo sapiens
  SITE (38): Xaa equals any of the naturally occurring L-amino acids
AIWPLRGLLRYRQFCGAASAAPRRSNMLRIPLRRALVXLSNKSSKGCVRTTATAASNLIEVFVDGQSVMVEPGTTVLQACEKVG

SEQ ID NO: 1167 - protein, 348 aa, Homo sapiens
LIFCGCWLFASLTVMEAAHFFEGTEKLLEVWFSRQQPDANQGSGDLRTIPRSEWDILLKDVQCSIISVTKTDKQEAYVLSESSMFVSKRRFILKTCGTTLLLKALVPLLKLARDYSGFDSIQSFFYSRKNFMKPSHQGYPHRNFQEEIEFLNAIFPNGAAYCMGRMNSDCWYLYTLDFPESRVISQPDQTLEILMSELDPAVMDQFYMKDGVTAKDVTRESGIRDLIPGSVIDATMFNPCGYSMNGMKSDGTYWTIHITPEPEFSYVSFETNLSQTSYDDLIRKVVEVFKPGKFVTTLFVNQSSKCRTVLASPQKIEGFKRLDCQSAMFNDYNFVFTSFAKKQQQQQS

SEQ ID NO: 1168 - protein, 90 aa, Homo sapiens
  SITE (19): Xaa equals any of the naturally occurring L-amino acids
SSQRLQGRARAVLSPPAPXSNVGTGEKKVTEAWISEDENSHRTTSDRLTVMELPSPESEEVHEPRLGELLGNPEGQSLGSSPSQDRGCNR

SEQ ID NO: 1169 - protein, 277 aa, Homo sapiens
RSTRWRPKVMWHLLRRYMASRLHSLRMGGYLFSGSQAPQLSPALLRALGQKCPNLKRLCLHVADLSMVPITSLPSTLRTLELHSCEISMAWLHKQQDPTVLPLLECIVLDRVPAFRDEHLQGLTRFRALRSLVLGGTYRVTETGLDAGLQELSYLQRLEVLGCTLSADSTLLAISRHLPRCAQDPADREGLSAPGLAVLEGMPALESLCLQGPLVTPEMPSPTEILSSCLTMPKLRVLELQGLGWEGQEAEKILCKGLPHCMVIVRACPKESMDWWM

SEQ ID NO: 1170 - protein, 489 aa, Homo sapiens
  SITE (349): Xaa equals any of the naturally occurring L-amino acids
  SITE (351): Xaa equals any of the naturally occurring L-amino acids
  SITE (356): Xaa equals any of the naturally occurring L-amino acids
  SITE (362): Xaa equals any of the naturally occurring L-amino acids
TRVFKELENTGKLICSPTHIDRVRLFLMQLRKMQTVKKEQASLDASSNVDKMMVLNSALTEVSEDSTTGEELLLSEGSVGKNKSSACRRKREFIPDEKKDAMYWEKRRKNNEAAKRSREKRRLNDLVLENKLIALGEENATLKAELLSLKLKFGLISSTAYAQEIQKLSNSTAVYFQDYQTSKSNVSSFVDEHEPSMVSSSCISVIKHSPQSSLSDVSEVSSVEHTQESSVQGSCRSPENKFQIIKQEPMELESYTREPRDDRGSYTASIYQNYMGNSFSGYSHSPPLLQVNRSSSNSPRTSETDDGVVGKSSDGEDEQQVPKGPIHSPVELKHVHATVVKVPEVNSSXLXHKLRXKAKAMXIKVEAFDNEFEATQKLSSPIDMTSKRHFELEKHSAPSMVHSSLTPFSVQVTNIQDWSLKSEHWHQKELSGKTQNSFKTGVVEMKDSGYKVSDPENLYLKQGIANLSAEVVSLKRLIATQPISASDSG

SEQ ID NO: 1171 - protein, 49 aa, Homo sapiens
GGVTKRQILHMIPLVIPRVKFMETESRKVVTSGWEGENVEFNGYRILVL

SEQ ID NO: 1172 - protein, 442 aa, Homo sapiens
AEARAKAEAAGLREAAARRRSLSPATMSTKQITCRYFMHGVCREGSQCLFSHDLANSKPSTICKYYQKGYCAYGTRCRYDHTRPSAAAGGAVGTMAHSVPSPAFHSPHPPSEVTASIVKTNSHEPGKREKRTLVLRDRNLSGMAERKTQPSMVSNPGSCSDPQPSPEMKPHSYLDAIRSGLDDVEASSSYSNEQQLCPYAAAGECRFGDACFYLHGEVCEICRLQVLHPFDPEQRKAHEKICMLTFEHEMEKAFAFQASQDKVCSICMEVILEKASASERRFGILSNCNHTYCLSCIRQWRCAKQFENPIIKSCPECRVISEFVIPSVYWVEDQNKKNELIEAFKQGMGKKACKYFEQGKGTCPFGSKCLYRHAYPDGRLAEPEKPRKQLSSQGTVRFFNSVRLWDFIENRESRHVPNNEDVDMTELGDLFMHLSGVESSEP

SEQ ID NO: 1173 - protein, 142 aa, Homo sapiens
  SITE (9): Xaa equals any of the naturally occurring L-amino acids
  SITE (63): Xaa equals any of the naturally occurring L-amino acids
  SITE (86): Xaa equals any of the naturally occurring L-amino acids
LEFWLLCLXSRHLLYQLLWNMFSKEVELADSMQTLFRGNSLASKIMTFCFKVYGATYLQKLLXPLLRIVITSSDWQHVSFEVDPTXLEPSESLEENQRNLLQMTEKFFHAIISSSSEFPPQLRSVCHCLYQATYHSLLNKAT

SEQ ID NO: 1174 - protein, 385 aa, Homo sapiens
  SITE (189): Xaa equals any of the naturally occurring L-amino acids
  SITE (313): Xaa equals any of the naturally occurring L-amino acids
PMRRPRGEPGPRAPRPTEGATCAGPGESWSPSPNSMLRVLLSAQTSPARLSGLLLIPPVQPCCLGPSKWGDRPVGGGPSAGPVQGLQRLLEQAKSPGELLRWLGQNPSKVRAHHYSVALRRLGQLLGSRPRPPPVEQVTLQDLSQLIIRNCPSFDIHTIHVCLHLAVLLGFPSDGPLVCALEQERRLAXPPKPPPPLQPLLRGGQGLEAALSCPRFLRYPRQHLISSLAEARPEELTPHVMVLLAQHLARHRLREPQLLEAIAHFLVVQETQLSSKVVQKLVLPFGRLNYLPLEQQFMPCLERILAREAGVAXLATVNILMSLCQLRCLPFRALHFVFSPGFINYISGTQPGWLAGPLRAGEAGEQGGLQPRAPVPASPQAPLML

SEQ ID NO: 1175 - protein, 114 aa, Homo sapiens
  SITE (50): Xaa equals any of the naturally occurring L-amino acids
HEQDPKWQRCRLSWESEPLWLFGRLMVTLKYCLPLVSRPSSIRWERRPQXMCLSDHGASCPALGKTETKSSQLALGEGLFPLPLAHFQEFDSESRAAVPGRVCTHICVGRKKRT

SEQ ID NO: 1176 - protein, 188 aa, Homo sapiens
  SITE (182): Xaa equals any of the naturally occurring L-amino acids
QRLESGDCIGVLDCEWCMVDSDGKTHLDKPYCAPQKECFGGIVGAKSPYVDDMGAIGDEVITLNMIKSAPVGPVAGGIMGCIMVLVLAVYAYRHQIHRRSHQHMSPLAAQEMSVRMSNLENDRDERDDDSHEDRGIISNTRFIAAVIERHAHSPERRRRYWGRSGTESDHGYSTMSPQEDSXKSSMQQ

SEQ ID NO: 1177 - protein, 95 aa, Homo sapiens
HIAKVSCTLLQGNVSFMALKHLGKKKMFKRINRAVVCIRMCVICVFYKLSIGGFRVLKCQHIPSPFVSQANMRENRKVLAVGIGSSGGQMSLPDP

SEQ ID NO: 1178 - protein, 197 aa, Homo sapiens
  SITE (10): Xaa equals any of the naturally occurring L-amino acids
NSLTLALPRXTTSHNSLTTPCYTPYYVAPEVLGPEKYDKSCDMWSLGVIMYILLCGYPPFYSNHGLAISPGMKTRIRMGQYEFPNPEWSEVSEEVKMLIRNLLKTEPTQRMTITEFMNHPWIMQSTKVPQTPLHTSRVLKEDKERWEDVKEEMTSALATMRVDYEQIKIKKIEDASNPLLLKRRKKARALEAAALAH

SEQ ID NO: 1179 - protein, 249 aa, Homo sapiens
  SITE (65): Xaa equals any of the naturally occurring L-amino acids
  SITE (71): Xaa equals any of the naturally occurring L-amino acids
  SITE (84): Xaa equals any of the naturally occurring L-amino acids
  SITE (109): Xaa equals any of the naturally occurring L-amino acids
  SITE (224): Xaa equals any of the naturally occurring L-amino acids
  SITE (226): Xaa equals any of the naturally occurring L-amino acids
HERIHTGEKPYKCKECRKTFSQMTHLTQHQTTHTREKFHECSECGKAFSRVSALIDHQRIHSGEXPYECKXCGRAFTQSAQLIXHQKTHSGEKPYECSKCKKSFVHLSXLIEHWRIHTGEKPYQCKDCKKTFCRVMQFTLHRRIHTGEKPYECKECGKSFSAHSSLVTHKRTHSGEKPYKCKECGKAFSAHSSLVTHKRTHSGEKPYTCHACGKAFNTSSTLCXHXRIHTGEKPFQCSQCGKSLVFSCR

SEQ ID NO: 1180 - protein, 377 aa, Homo sapiens
  SITE (12): Xaa equals any of the naturally occurring L-amino acids
  SITE (324): Xaa equals any of the naturally occurring L-amino acids
  SITE (360): Xaa equals any of the naturally occurring L-amino acids
  SITE (362): Xaa equals any of the naturally occurring L-amino acids
EDREAEPQIAAXNLKFQGASNLTLSETQNGDVSEETMGSRKVKKSKQKPMNVGLSETQNGGMSQEAVGNIKVTKSPQKSTVLSNGEAAMQSSNSESKKKKKKKRKMVNDAEPDTKKAKTENKGKSEEESAETTKETENNVEKPDNDEDESEVPSLPLGLTGAFEDTSFASLCNLVNENTLKAIKEMGFTNMTEIQHKSIRPLLEGRDLLAAAKTGSGKTLAFLIPAVELIVKLRFMPRNGTGVLILSPTRELAMQTFGVLKELMTHHVHTYGLIMGGSNRSAEAQKLGNGINIIVATPGRLLDHMQNTPGFMYKNLQCLVIDEXDRILDVGFEEELKQIIKLLPTRRQTMLFSATQTRKXEXLARISLKKEPLVCWR

SEQ ID NO: 1181 - protein, 422 aa, Homo sapiens
  SITE (26): Xaa equals any of the naturally occurring L-amino acids
  SITE (27): Xaa equals any of the naturally occurring L-amino acids
  SITE (33): Xaa equals any of the naturally occurring L-amino acids
  SITE (34): Xaa equals any of the naturally occurring L-amino acids
  SITE (53): Xaa equals any of the naturally occurring L-amino acids
  SITE (57): Xaa equals any of the naturally occurring L-amino acids
  SITE (129): Xaa equals any of the naturally occurring L-amino acids
  SITE (248): Xaa equals any of the naturally occurring L-amino acids
SHLLQTTYPKQRMPDRRHSKSAQIIXXPVPYQXXSHTSYLYTQYAPVPFGIPXPMPXPMLIPSSMDSEDKVTESIEDIKEKLPTHPFEADLLEMAEMIAEDEEKKTLSQGESQTSEHELFLDTKIFEKXQGSTYSGDLESEAVSTPHSWEEELNHYALKSNAVQEADSELKQFSKGETERTWKQIFHQTPLTHLIKDGNPGTFPNRRRHRDGFPQPRRRGRKKSIVAVEPRSLIQGAFQGCSVSGMTXKYMYGVNAWKNWVQWKNAKEEQGDLKCGGVEQASSSPRSDPLGSTQDHALSQESSEPGCRVRSIKLKEDILSCTFAELSLGLCQFIQEVRRPNGEKYDPDSILYLCLGIQQYLFENGRIDNIFTEPYSRFMIELTKLLKIWEPTILPNGYMFSRIEEEHLWECKQLGAYSPIAF

SEQ ID NO: 1182 - protein, 26 aa, Homo sapiens
  SITE (9): Xaa equals any of the naturally occurring L-amino acids
  SITE (25): Xaa equals any of the naturally occurring L-amino acids
KTGACPEDXKYCPQSSRYKTGLEPXG

SEQ ID NO: 1183 - protein, 17 aa, Homo sapiens
GQEIETVLANMVKPRLY

SEQ ID NO: 1184 - protein, 165 aa, Homo sapiens
  SITE (158): Xaa equals any of the naturally occurring L-amino acids
CDSWNAVMSTLCPPPSPAVAKTEIALSGKSPLLAATFAYWDNILGPRVRHIWAPKTEQVLLSDGEITFLANHTLNGEILRNAESGAIDVKFFVLSEKGVIIVSLIFDGNWNGDRSTYGLSIILPQTELSFYLPLHRVCVDRLTHIIRKGRIWMHKERXEMSRRLS

SEQ ID NO: 1185 - protein, 110 aa, Homo sapiens
  SITE (79): Xaa equals any of the naturally occurring L-amino acids
  SITE (91): Xaa equals any of the naturally occurring L-amino acids
  SITE (96): Xaa equals any of the naturally occurring L-amino acids
GTAFTRQCSQGPWYRARSRVPQVVRLPGPHLEPSLCSFESRCCPTPIPNQPPPPASLPSVPFILPGVPSACHGTACYLXQLQMPALNLPWXPFLYXVNSLNSALPLPALK

SEQ ID NO: 1186 - protein, 352 aa, Homo sapiens
CRSPEASVLFPEVSGLGQPPSSSLRMASSSGSKAEFIVGGKYKLVRKIGSGSFGDIYLAINITNGEEVAVKLESQKARHPQLLYESKLYKILQGGVGIPHIRWYGQEKDYNVLVMDLLGPSLEDLFNFCSRRFTMKTVLMLADQMISRIEYVHTKNFIHRDIKPDNFLMGIGRHCNKLFLIDFGLAKKYRDNRTRQHIPYREDKNLTGTARYASINAHLGIEQSRRDDMESLGYVLMYFNRTSLPWQGLKAATKKQKYEKISEKKMSTPVEVLCKGFPAEFAMYLNYCRGLRFEEAPDYMYLRQLFRILFRTLNHQYDYTFDWDNVKAESSTAGSLFQWAGSAGPNPHRQAN

SEQ ID NO: 1187 - protein, 482 aa, Homo sapiens
  SITE (11): Xaa equals any of the naturally occurring L-amino acids
  SITE (31): Xaa equals any of the naturally occurring L-amino acids
  SITE (105): Xaa equals any of the naturally occurring L-amino acids
  SITE (259): Xaa equals any of the naturally occurring L-amino acids
  SITE (450): Xaa equals any of the naturally occurring L-amino acids
  SITE (459): Xaa equals any of the naturally occurring L-amino acids
  SITE (475): Xaa equals any of the naturally occurring L-amino acids
AGLVAAGAVRXLYPASRAGERTRVPGSPAPXSLPLHSPGACGTEVDMDPQRSPLLEVKGNIELKRPLIKAPSQLPLSGSRLKRRPDQMEDGLEPEKKRTRGLGAXTKITTSHPRVPSLTTVPQTQGQTTAQKVSKKTGPRCSTAIATGLKNQKPVPAVPVQKSGTSGVPPMAGGKKPSKRPAWDLKGQLCDLNAELKRCRERTQTLDQENQQLQDQLRDAQQQVKALGTERTTLEGHLAKVQAQAEQGQQELKNLRACXLELEERLSTQEGLVQELQKKQVELQEERRGLMSQLEEKERRLQTSEAALSSSQAEVASLRQETVAQAALLTEREERLHGLEMERRRLHNQLQELKGNIRVFCRVRPVLPGEPTPPPGLLLFPSGPGGPSDPPTRLSLSRSDERRGTLSGAPAPPTRHDFSFDRVFPPGSGQDEVFEEIAMLVQSALDGYPXCIFAYGQTXSGKTFTMEGGLGETPXGRADPSG

SEQ ID NO: 1188 - protein, 345 aa, Homo sapiens
  SITE (175): Xaa equals any of the naturally occurring L-amino acids
TASLSNAVKILLRWVTRYSCPRAFVTGMPKRGKKGAVAEDGDELRTEPEAKKSKTAAKKNDKEAAGEGPALYEDPPDQKTSPSGKPATLKICSWNVDGLRAWIKKKGLDWVKEEAPDILCLQETKCSENKLPAELQELPGLSHQYWSAPSDKEGYSGVGLLSRQCPLKVSYGIGXEEHDQEGRVIVAEFDSFVLVTAYVPNAGRGLVRLEYRQRWDEAFRKFLKGLASRKPLVLCGDLNVAHEEIDLRNPKGNKKNAGFTPQERQGFGELLQAVPLADSFRHLYPNTPYAYTFWTYMMNARSKNVGWRLDYFLLSHSLLPALCDSKIRSKALGSDHCPITLYLAL

SEQ ID NO: 1189 - protein, 136 aa, Homo sapiens
DISTPSLTTDHAPLTISLKPNHPYRTQCQYPIPQHALKRLKPVIIRLLQHGLLNPINSPYNSPIFPVLKRDKPYKLVQDLRLINQIVLPIHPVVPNPYTLLSSIPPSTTHYSVLDLRHAFFTIALHPSSQPLFAFT

SEQ ID NO: 1190 - protein, 128 aa, Homo sapiens
  SITE (2): Xaa equals any of the naturally occurring L-amino acids
  SITE (12): Xaa equals any of the naturally occurring L-amino acids
  SITE (14): Xaa equals any of the naturally occurring L-amino acids
  SITE (25): Xaa equals any of the naturally occurring L-amino acids
LXQKTQPTHEKXAXSFLGMVCIWVXSIQTSINTSFILGLPNSFPQDLKTITMIKVSFAPCQRLGPLPFPSRQYSVQLGLVPSLSVRTEFHPRFSTQALCSGKVKPSLKGSKSSAIDRAAGGKRSRCIR

SEQ ID NO: 1191 - protein, 236 aa, Homo sapiens
RAGSVKRRQRGKMAAAVPQRAWTVEQLRSEQLPKKDIIKFLQEHGSDSFLAEHKLLGNIKNVAKTANKDHLVTAYNHLFETKRFKGTESISKVSEQVKNVKLNEDKPKETKSEETLDEGPPKYTKSVLKKGDKTNFPKKGDVVHCWYTGTLQDGTVFDTNIQTSAKKKKNAKPLSFKVGVGKVIRGWDEALLTMSKGEKARLEIEPEWAYGKKGQPDAKIPPNAKLTFEVELVDID

SEQ ID NO: 1192 - protein, 204 aa, Homo sapiens
PAMEAEAGGLEELTDEEMAALGKEELVRRLRREEAARLAALVQRGRLMQEVNRQLQGHLGEIRELKQLNRRLQAENRELRDLCCFLDSERQRGRRAARQWQLFGTQASRAVREDLGGCWQKLAELEGRQEELLRENLALKELCLALGEEWGPRGGPSGAGGSGAGPAPELALPPCGPRDLGDGSSSTGSVGSPDQLPLACSPDD

SEQ ID NO: 1193 - protein, 66 aa, Homo sapiens
  SITE (56): Xaa equals any of the naturally occurring L-amino acids
  SITE (59): Xaa equals any of the naturally occurring L-amino acids
SQQTELITVILGVFFCRVKHVNILHRHKYKHDKHWTWKMGSKFCTCAFLYFCCIFXSCXFAKYIIN

SEQ ID NO: 1194 - protein, 305 aa, Homo sapiens
TCAGPRGAACGRLRLPAAGALLPAAQRRVHRYEESEVISLPFLDQLVSTLVGLLSPHNPALAAAALDYRCPVHFYWVRGEEIIPRGHRRGRIDDLRYQIDDKPNNQIRISKQLAEFVPLDYSVPIEIPTIKCKPDKLPLFKRQYENHIFVGSKTADPCCYGHTQFHLLPDKLRRERLLRQNCADQIEVVFRANAIASLFAWTGAQAMYQGFWSEADVTRPFVSQAVITDGKYFSFFCYQLNTLALTTQADQNNPRKNICWGTQSKPLYETIEDNDVKGFNDDVLLQIVHFLLNRPKEEKSQLLEN

SEQ ID NO: 1195 - protein, 102 aa, Homo sapiens
  SITE (28): Xaa equals any of the naturally occurring L-amino acids
  SITE (38): Xaa equals any of the naturally occurring L-amino acids
GRAAPQLQDLASSCPQEEVSQQQESVSXLPASVHPQLXHGRAWRPSTCSTDSRSPAFCQRPRTPVSICCRIKRLFLQKQSQLQAYFNQMQIAESSYPQPSQQ

SEQ ID NO: 1196 - protein, 123 aa, Homo sapiens
ARGPAAACPLRWPPAAARAMAGKAHRLSAEERDQLLPNLRAVGWNELEGRDAIFKQFHFKDFNRAFGFMTRVALQAEKLDHHPEWFNVYNKVHITLSTHECAGLSERDINLASFIEQVAVSMT

SEQ ID NO: 1197 - protein, 247 aa, Homo sapiens
  SITE (28): Xaa equals any of the naturally occurring L-amino acids
  SITE (31): Xaa equals any of the naturally occurring L-amino acids
ARGGGKSGRAGGAGARRGGKELRVAAEXPRXQRRPTQPSRRRRRAPMAAAKDTHEDHDTSTENTDESNHDPQFEPIVSLPEQEIKTLEEDEEELFKMRAKLFRFASENDLPEWKERGTGDVKLLKHKEKGAIRLLMRRDKTLKICANHYITPMMELKPNAGSDRAWVWNTHADFADECPKPELLAIRFLNAENAQKFKTKFEECRKEIEEREKKAGSGKNDHAEKVAEKLEALSVKEETKEDAEEKQ

SEQ ID NO: 1198 - protein, 60 aa, Homo sapiens
FGFSTCITNPAPICHIKVCDLKFSQHPHQTLFFYVFFATYECFENKVPMSLLEKKKKKKK

SEQ ID NO: 1199 - protein, 198 aa, Homo sapiens
  SITE (189): Xaa equals any of the naturally occurring L-amino acids
  SITE (194): Xaa equals any of the naturally occurring L-amino acids
  SITE (195): Xaa equals any of the naturally occurring L-amino acids
SDKWPTAVRANGHLLLNSEKMSKSTGNFLTLTQAIDKFSADGMRLALADAGDTVEDANFVEAMADAGILRLYTWVEWVKEMVANWDSLRSGPASTFNDRVFASELNAGIIKTDQNYEKMMFKEALKTGFFEFQAAKDKYRELAVEGMHRELVFRFIEVQTLLLAPFCPHLCEAHLGHSWGKPDFNYGMXSWACXXGPV

SEQ ID NO: 1200 - protein, 174 aa, Homo sapiens
  SITE (16): Xaa equals any of the naturally occurring L-amino acids
LYGCEKTTEGGGGREXAGKMVVTRSARAKASIQAASAESSGQKSFAANGIQAHPESSTGSDARTTAESQTTGKQSLIPRTPKARKRKSRTTGSLPKGTEPSTDGETSEAESNYSVSEHHDTILRVTRRRQILIACSPVSSVRKKPKVTPTKESYTEEIVSEAESHVSGISRNCA

SEQ ID NO: 1201 - protein, 689 aa, Homo sapiens
WSTEVEPSGIIFKNSKTGKVDNIQAGELTEGIWRRVALGHGLKLLTKNGHVYKYDGFRESEFEKLSDFFKTHYRLELMEKDLCVKGWNWGTVKFGGQLLSFDIGDQPVFEIPLSNVSQCTTGKNEVTLEFHQNDDAEVSLMEVRFYVPPTQEDGVDPVEAFAQNVLSKADVIQATGDAICIFRELQCLTPRGRYDIRIYPTFLHLHGKTFDYKIPYTTVLRLFLLPHKDQRQMFFVISLDPPIKQGQTRYHFLILLFSKDEDISLTLNMNEEEVEKRFEGRLTKNMSGSLYEMVSRVMKALVNRKITVPGNFQGHSGAQCITCSYKASSGLLYPLERGFIYVHKPPVHIRFDEISFVNFARGTTTTRSFDFEIETKQGTQYTFSSIEREEYGKLFDFVNAKKLNIKNRGLKEGMNPSYDEYADSDEDQHDAYLERMKEEGKIREENANDSSDDSGEETDESFNPGEEEEDVAEEFDSNASASSSSNEGDSDRDEKKRKQLKKAKMAKDRKSRKKPVEVKKGKDPNAPKRPMSAYMLWLNASREKIKSDHPGISITDLSKKAGEIWKGMSKEKKEEWDRKAEDARRDYEKAMKEYEGGRGESSKRDKSKKKKKVKVKMEKKSTPSRGSSSKSSSRQLSESFKSKEFVSSDESSSGENKSKKKRRRSEDSEEEELASTPPSSEDSASGSDE

SEQ ID NO: 1202 - protein, 65 aa, Homo sapiens
  SITE (38): Xaa equals any of the naturally occurring L-amino acids
NLSELLQADFLGQGEIMVLKCLIRSHTQFQVHYSKSMXTAPTATNLLLPSRVACTIFIACPGWVG

SEQ ID NO: 1203 - protein, 379 aa, Homo sapiens
  SITE (132): Xaa equals any of the naturally occurring L-amino acids
  SITE (255): Xaa equals any of the naturally occurring L-amino acids
GRLRALALAVSAPGLTFKMVHAEAFSRPLSRNEVVGLIFRLTIFGAVTYFTIKWMVDAIDPTRKQKVEAQKQAEKLMKQIGVKNVKLSEYEMSIAAHLVDPLNMHVTWSDIAGLDDVITDLKDTVILPIKKXHLFENSRLLQPPKGVLLYGPPGCGKTLIAKATAKEAGCRFINLQPSTLTDKWYGESQKLAAAVFSLAIKLQPSIIFIDEIDSFLRNRSSSDHEATAMMKAQFMSLWDGLDTDHSCQVIVMGAXNRPQDLDSAIMRRMPTRFHINQPALKQREAILKLILKNENVDRHVDLLEVAQETDGFSGSDLKEMCRDAALLCVREYVNSTSEESHDEDEIRPVQQQDLHRAIEKMKKSKDAAFQNVLTHVCLD

SEQ ID NO: 1204 - protein, 77 aa, Homo sapiens
  SITE (3): Xaa equals any of the naturally occurring L-amino acids
LSXPGAWFYVPVAMFPVSSGCFQEQQETNKSLTLLRCSQRDTSPLMDGQTWAGSVSLNHPPLPQLPTTDTSDDTPGK

SEQ ID NO: 1205 - protein, 305 aa, Homo sapiens
  SITE (222): Xaa equals any of the naturally occurring L-amino acids
  SITE (223): Xaa equals any of the naturally occurring L-amino acids
  SITE (227): Xaa equals any of the naturally occurring L-amino acids
  SITE (235): Xaa equals any of the naturally occurring L-amino acids
  SITE (239): Xaa equals any of the naturally occurring L-amino acids
  SITE (273): Xaa equals any of the naturally occurring L-amino acids
  SITE (277): Xaa equals any of the naturally occurring L-amino acids
  SITE (284): Xaa equals any of the naturally occurring L-amino acids
FTSVSCTSTSSFSSNAAQRFFLLHGTKCNYSPGSPVYFCYESSYFNTTSRPTSCSAVSSAVNIMNGSQMHINPANKSLPPTFGPATLFNHFSSLFDSSQVPANQGWGDGPLSSRVATDASFTVQSAFLGNSVLGHLENMHPDNSKAPGFRPPSQRVSTSPVGLPSIDPSGSSPSSSSAPLASFSGIPGTRVFLQGPAPVGTPSFNRQHFSPHPWTSASNSCXXPIPXVSSGSSSXLSAXSCPTNVGANQKGVSASQGFGKVTFPQLGNRRRTXARIXGKGGGFXWHKAPGGNQFFCSVSLWDKVG

SEQ ID NO: 1206 - protein, 61 aa, Homo sapiens
  SITE (15): Xaa equals any of the naturally occurring L-amino acids
  SITE (33): Xaa equals any of the naturally occurring L-amino acids
  SITE (42): Xaa equals any of the naturally occurring L-amino acids
  SITE (52): Xaa equals any of the naturally occurring L-amino acids
  SITE (56): Xaa equals any of the naturally occurring L-amino acids
REHSAFDLWEISSWXPWCCTDHQEELKSSGNLXKIKSPPARXLSKITGRLLXQHVXECASG

SEQ ID NO: 1207 - protein, 177 aa, Homo sapiens
NSAQGMAGSPELVVLDPPWDKELAAGTESQALVSATPREDFRVRCTAKRAVTEMLQLCGRFVQKLGDALPEEIREPALRDAQWTFESAVQENISINGQAWQEASDNCFMDSDIKVLEDQFDEIIVDIATKRKQYPRKILECVIKTIKAKQEILKQYHPVVHPLDLKYDPDPVLACIN

SEQ ID NO: 1208 - protein, 288 aa, Homo sapiens
  SITE (277): Xaa equals any of the naturally occurring L-amino acids
PHRVDTRRRDPVPRSRALSHGTGRVGAAAGESSRAPRCWSGSRPRAPADPPRHRPLLCLSRRGSPPHHLGCLLGESFMQLQQRLLREKEAKIRKALDRLRKKRHLLRRQRTRREFPVISVVGYTNCGKTTLIKALTGDAAIQPRDQLFATLDVTAHAGTLPSRMTVLYVDTIGFLSQLPHGLIESFSATLEDVAHSDLILHVRDVSHPEAELQKCSVLSTLRGLQLPAPLLDSMVEVHNKVDLVPGYSPTEPNVVPVSALRGHGLQELKLSSMRRFXRRRGDRSSLSV

SEQ ID NO: 1209 - protein, 327 aa, Homo sapiens
  SITE (30): Xaa equals any of the naturally occurring L-amino acids
  SITE (261): Xaa equals any of the naturally occurring L-amino acids
NILGGGKWFLRGILLILPQVYLPCVLQTKXRYVGYMYETLDQKDPVFDAKGIETVRRDSCPAVSKILERSLKLLFETRDISLIKQYVQRQCMKLLEGKASIQDFIFAKEYRGSFSYKPGACVPALELTRKMLTYDRRSEPQVGERVPYVIIYGTPGVPLIQLVRRPVEVLQDPTLRLNATYYITKQILPPLARIFSLIGIDVFSWYHELPRIHKATSSSRSEPEGRKGTISQYFTTLHCPVCDDLTQHGICSKCRSQPQHXAVILNQEIRELERQQEQLVKICKNCTGCFDRHIPCVSLNCPVLFKLSRVNRELSKAPYLRQLLDQF

SEQ ID NO: 1210 - protein, 676 aa, Homo sapiens
  SITE (374): Xaa equals any of the naturally occurring L-amino acids
PVLRTHPGPQSLPRVPGVPCGGLLEPLSRAEVSPRLGLRRDLLGGMAPPGSSTVFLLALTIIASTWALTPTHYLTKHDVERLKASLDRPFTNLESAFYSIVGLSSLGAQVPDAKKACTYIRSNLDPSNVDSLFYAAQASQALSGCEISISNETKDLLLAAVSEDSSVTQIYHAVAALSGFGLPLASQEALSALTARLSKEETVLATVQALQTASHLSQQADLRSIVEEIEDLVARLDELGGVYLQFEEGLETTALFVAATYKLMDHVGTEPSIKEDQVIQLMNAIFSKKNFESLSEAFSVASAAAVLSHNRYHVPVVVVPEGSASDTHEQAILRLQVTNVLSQPLTQATVKLEHAKSVASRATVLQKTSFTPVXDVFELNFMNVKFSSGYYDFLVEVEGDNRYIANTVELRVKISTEVGITNVDLSTVDKDQSIAPKTTRVTYPAKAKGTFIADSHQNFALFFQLVDVNTGAELTPHQTFVRLHNQKTGQEVVFVAEPDNKNVYKFELDTSERKIEFDSASGTYTLYLIIGDATLKNPILWNVADVVIKFPEEEAPSTVLSQNLFTPKQEIQHLFREPEKRPPTVVSNTFTALILSPLLLLFALWIRIGANVSNFTFAPSTIIFHLGHAAMLGLMYVYWTQLNMFQTLKYLAILGSVTFLAGNRMLAQQAVKRTAH

SEQ ID NO: 1211 - protein, 56 aa, Homo sapiens
HVCLTLMEGINPQNFLPRELGNCPRNKPCTVEWTWISNNLLLCRICSLVIVWCVIL

SEQ ID NO: 1212 - protein, 61 aa, Homo sapiens
SYPAAKSSVIFGALRITLVSAHFPFCLPYKAQNRVGKKYETSTVSTFLEVWYLVSRLRPQD

SEQ ID NO: 1213 - protein, 260 aa, Homo sapiens
  SITE (205): Xaa equals any of the naturally occurring L-amino acids
CPPECRWCVARLALRESWGLLPERYGYVDRNRIFGCDPPYYAVLEGEQFTSGVSTLQEETTVSLNTVDSIESFVADINSGHWDTVLQAIQSLKLPDKTLIDLYEQVVLELIELRELGAARSLLRQTDPMIMLKQTQPERYIHLENLLARSYFDPREAYPDGSSKEKRRAAIAQALAGEVSVVPPSRLMALLGQALKWQQHQGLLXPGMTIDLFRGKAAVKDVEEEKFPTQLSRHIKFGQKSHVECARFSPDGPVFGHWVC

SEQ ID NO: 1214 - protein, 95 aa, Homo sapiens [sequence omitted]

SEQ ID NO: 1215 - protein, 365 aa, Homo sapiens
  SITE (1): Xaa equals any of the naturally occurring L-amino acids
XHGIGVTATNFTTHNIPQTFTTAIRCTKCGKGVDNMPELHKHILACASASDKKRYTPKKNPVPLKQTVQPKNGVVVLDNSGKNAFRRMGQPKRLNFSVELSKMSSNKLKLNALKKKNQLVQKAILQKNKSAKQKADLKNACESSSHICPYCNREFTYIGSLNKHAAFSCPKKPLSPPKKKVSHSSKKGGHSSPASSDKNSNSNHRRRTADAEIKMQSMQTPLGKTRARSSGPTQVPLPSSSFRSKQNVKFAASVKSKKPSSSSLRNSSPIRMAKITHVEGKKPKAVAKNHSAQLSSKTSRSLHVRVQKSKAVLQSKSTLASKKRTDRFNIKSRERSGGPVTRSLQLAAAADLSENKREDGSASRS

SEQ ID NO: 1216 - protein, 558 aa, Homo sapiens
AHASAHAATPRRLWALSIVSFSSAGAAMAAVKTLNPKAEVARAQAALAVNISAARGLQDVLRTNLGPKGTMKMLVSGAGDIKLTKDGNVLLHEMQIQHPTASLIAKVATAQDDITGDGTTSNVLIIGELLKQADLYISEGLHPRIITEGFEAAKEKALQFLEEVKVSREMDRETLIDVARTSLRTKVHAELADVLTEAVVDSILAIKKQDEPIDLFMIEIMEMKHKSETDTSLIRGLVLDHGARHPDMKKRVEDAYILTCNVSLEYEKTEVNSGFFYKSAEEREKLVKAERKFIEDRVKKIIELKRKVCGDSDKGFVVINQKGIDPFSLDALSKEGIVALRRAKRRNMERLTLACGGVALNSFDDLSPDCLGHAGLVYEYTLGEEKFTFIEKCNNPRSVTLLIKGPNKHTLTQIKDAVRDGLRAVKNAIDDGCVVPGAGAVEVAMAEALIKHKPSVKGRAQLGVQAFADALLIIPKVLAQNSGFDLQETLVKIQAEHSESGQLVGVDLNTGEPMVAAEVGVWDNYCVKKQLLHSCTVIATNILLVDEIMRAGMSSLKG

SEQ ID NO: 1217 - protein, 226 aa, Homo sapiens
  SITE (98): Xaa equals any of the naturally occurring L-amino acids
  SITE (145): Xaa equals any of the naturally occurring L-amino acids
  SITE (146): Xaa equals any of the naturally occurring L-amino acids
  SITE (185): Xaa equals any of the naturally occurring L-amino acids
  SITE (192): Xaa equals any of the naturally occurring L-amino acids
  SITE (199): Xaa equals any of the naturally occurring L-amino acids
  SITE (206): Xaa equals any of the naturally occurring L-amino acids
  SITE (212): Xaa equals any of the naturally occurring L-amino acids
  SITE (218): Xaa equals any of the naturally occurring L-amino acids
LKVLWCFLIHVQGSIRQFAACLVLTDFGIAVFEIPHQESRGSSQHILSSLRFVFCFPHGDLTEFGFLMPELCLVLKVRHSENTLFIISDAANLHEFHXDLRSCFAPQHMAMLCSPILYGSHTSLQEFLRQLLTFYKVAGGCQERXXGCFPVYLVYSDKRMVQTAAGDYSGNIEWPAAHSVQPCGXPAARPLXPSSPPPXPTGCCSXPSTQSXQSRLQXHAQTVEPK

SEQ ID NO: 1218 - protein, 255 aa, Homo sapiens
  SITE (2): Xaa equals any of the naturally occurring L-amino acids
CXLPGCEAHIIPFILDEIGADIEDRHIVVSCAAGVTISSIEKKLSAFRPAPRVIRCMTNTPVVVREGATVYATGTHAQVEDGRLMEQLLSSVGFCTEVEEDLIDAVTGLSGSGPAYAFTALDALADGGVKMGLPRRLAVRLGAQALLGAAKMLLHSEQHPGQLKDNVSSPGGATIHALHVLESGGFRSLLINAVEASCIRTRELQSMADQEQVSPAAIKKTILDKVKLDSPAGTALSPSGHTKLLPRSLAPAGKD

SEQ ID NO: 1219 - protein, 590 aa, Homo sapiens
  SITE (17): Xaa equals any of the naturally occurring L-amino acids
  SITE (116): Xaa equals any of the naturally occurring L-amino acids
  SITE (127): Xaa equals any of the naturally occurring L-amino acids
  SITE (131): Xaa equals any of the naturally occurring L-amino acids
  SITE (134): Xaa equals any of the naturally occurring L-amino acids
  SITE (158): Xaa equals any of the naturally occurring L-amino acids
  SITE (161): Xaa equals any of the naturally occurring L-amino acids
  SITE (213): Xaa equals any of the naturally occurring L-amino acids
  SITE (216): Xaa equals any of the naturally occurring L-amino acids
AQVRAPPWLCCPRAWTXCPPPACRRAGRPTRPSCSAVTAPGSGGLVAGGPEAFAAFLRRERLARFLNPDEVHAILRAAERPGEEGAAAAAAARTRSAPRTTALRALLPRAVGPGAXAVGAWLARLLXGRLXRRXACRDALPAPRRWRRWPLRLQGRSXPHXRSAREVIAVVMDVFTDIDIFRDLQEICRKQGVAVYILLDQALLSQFLDMCMXLKXHPEQEKLMTVRTITGNIYYARSGTKIIGKVHEKFTLIDGIRVATGSYSFTWTDGKLNSSNLVILSGQVVEHFDLEFRILYAQSKPISPKLLSHFQSSNKFDHLTNRKPQSKELTLGNLLRMRLARLSSTPRKADLDPEMPAEGKAERKPHDCESSTVSEEDYFSSHRDELQSRKAIDAATQTEPGEEMPGLSVSEVGTQTSITTACAGTQTAVITRIASSQTTIWSRSTTTQTDMDENILFPRGTQSTEGSPVSKMSVSRSSSLKSSSSVSSQGSVASSTGSPASIRTTDFHNPGYPKYLGTPHLELYLSDSLRNLNKERQFHFAGIRSRLNHMLAMLSRRTLFTENHLGLHSGNFSRVNLLAVRDVALYPSYQ

SEQ ID NO: 1220 - protein, 451 aa, Homo sapiens
  SITE (29): Xaa equals any of the naturally occurring L-amino acids
VEISGPRPVDWEVRPPLQRLGLCFGSCRXQQSLPGRGSANLLPSVRSESAVLSDCVGGFPGRSSVRAWIAGPRCTPASPTRVLSLSWRLFNSASLLLLATSTSGSECRFPRSPRARERGIPDCERLLVRRSCWRSGDPRPAGPAGHAAGAFSTPQYLGGTAMVLLHVKRGDESQFLLQAPGSTELEELTVQVARVYNGRLKVQRLCSEMEELAEHGIFLPPNMQGLTDDQIEELKLKDEWGEKCVPSGGAVFKKDDIGRRNGQAPNEKMKQVLKKTIEEAKAIISKKQVEAGVCVTMEMVKDALDQLRGAVMIVYPMGLPPYDPIRMEFENKEDLSGTQAGLNVIKEAEAQLWWAAKELRRTKKLSDYVGKNEKTKIIAKIQQRGQGAPAREPIISSEEQKQLMLYYHRRQEELKRLEENDDDAYLNSPWADNTALKRHFHGVKDIKWRPR

SEQ ID NO: 1221 - protein, 85 aa, Homo sapiens
  SITE (14): Xaa equals any of the naturally occurring L-amino acids
AEPGLSNPWGAGSXALGHTWLPAPMVPVPWNGDGQFWGQMWCSGIQSHFLPGHELSQRPLQPHSAPTYLGTPAGAREAPGGLGPK

SEQ ID NO: 1222 - protein, 120 aa, Homo sapiens
GLPEHVVPRLLQGVEVSWGWPRPRLLSQGEAATDSHPTALLKRMFAVVGGVPVPTLPGTRPWGTLAQGCLGPASCAAKVGGPHPKTNPGPRPLEARASLHGLRGVGISPQSDLASELFSR

SEQ ID NO: 1223 - protein, 228 aa, Homo sapiens
  SITE (164): Xaa equals any of the naturally occurring L-amino acids
  SITE (204): Xaa equals any of the naturally occurring L-amino acids
  SITE (212): Xaa equals any of the naturally occurring L-amino acids
  SITE (215): Xaa equals any of the naturally occurring L-amino acids
AETHFSLPEFEPPFPSSRSPTPGAMDPFTEKLLERTRARRENLQRKMAERPTAAPRSMTHAKRARQPLSEASNQQPLSGGEEKSCTKPSPSKKRCSDNTEVEVSNLENKQPVESTSAKSCSPSPVSPQVQPQAADTISDSVAVPASLLGMRRGLNSRLEATAAXSVKTRMQKLAEQRRRWDNDDMTDDIPESSLFSPMPSEEKXAFPSQTSXFQXAFGNFQLAKKGAR

SEQ ID NO: 1224 - protein, 178 aa, Homo sapiens
  SITE (6): Xaa equals any of the naturally occurring L-amino acids
  SITE (26): Xaa equals any of the naturally occurring L-amino acids
  SITE (142): Xaa equals any of the naturally occurring L-amino acids
VDCGNXAAKWFTNFLKTEAYRLVQFXTNMKGRTSRKLLPTLDQNFQVAYPDYCPLLIMTDASLVDLNTRMEKKMKMENFRPNIVVTGCDAFEEDTWDELLIGSVEVKKVMACPRCILTTVDPDTGVIDRKQPLDTLKSYRLXDPSERELYKLSPLFGIYYSVEKIGSLRVGDPVYRMV

SEQ ID NO: 1225 - protein, 64 aa, Homo sapiens
RNIWKRQKTKKEEKRSLLDTLLKYNHINILSYFLPAFLGQILVGFYIVEIVLFIQFYTLFHLTL

SEQ ID NO: 1226 - protein, 33 aa, Homo sapiens
KGNKSWSSTAVAAALELVDPPGCRNVTISTCCP

SEQ ID NO: 1227 - protein, 402 aa, Homo sapiens
DQAGPASAEQLHAGPATEEPGPCLSQQLHSASAEDTPVVQLAAETPTAESKERALNSASTSLPTSCPGSEPVPTHQQGQPALELKEESFRDPAEVLGTGAEVDYLEQFGTSSFKESALRKQSLYLKFDPLLRDSPGRPVPVATETSSMHGANETPSGRPREAKLVEFDFLGALDIPVPGPPPGVPAPGGPPLSTGPIVDLLQYSQKDLDAVVKATQEENRELRSRCEELHGKNLELGKIMDRFEEVVYQAMEEVQKQKELSKAEIQKVLKEKDQLTTDLNSMEKSFSDLFKRFEKQKEVIEGYRKNEESLKKCVEDYLARITQEGQRYQALKAHAEEKLQLANEEIAQVRSKAQAEALALQASLRKEQMRIQSLEKTVEQKTKENEELTRICDDLISKMEKI

SEQ ID NO: 1228 - protein, 460 aa, Homo sapiens
  SITE (75): Xaa equals any of the naturally occurring L-amino acids
  SITE (147): Xaa equals any of the naturally occurring L-amino acids
  SITE (435): Xaa equals any of the naturally occurring L-amino acids
KGAGRCRLSKIGATRRPPPARVRVAVRLRPFVDGTAGASDPPCVRGMDSCSLEIANWRNHQETLKYQFDAFYGEXSTQQDIYAGSVQPILRHLLEGQNASVLAYGPTGAGKTHTMLGSPEQPGVIPRALMDLLQLTREEGAEGRPWXLSVTMSYLEIYQEKVLDLLDPASGDLVIREDCRGNILIPGLSQKPISSFADFERHFLPASRNRTVGATRLNQRSSRSHAVLLVKVDQRERLAPFRQREGKLYLIDLAGSEDNRRTGNKGLRLKESGAINTSLFVLGKVVDALNQGLPRVPYRDSKLTRLLQDSLGGSAHSILIANIAPERRFYLDTVSALNFAARSKEVINRPFTNESLQPHALGPVKLSQKELLGPPEAKRARGPEEEEIGSPEPMAAPASASQKLSPLQKLSSMDPAMLERLLQLGPSACLPGEPXGPSVEYPKARADGANEDSRREGPRD

SEQ ID NO: 1229 - protein, 239 aa, Homo sapiens
ARGRLAFPCGRPDYWALARRTIGTGLERKALGLPGSSERPTSVSSYQGTRIRCSNPGGKMRPLTEEETRVMFEKIAKYIGENLQLLVDRPDGTYCFRLHNDRVYYVSEKIMKLAANISGDKLVSLGTCFGKFTKTHKFRLHVTALDYLAPYAKYKVWIKPGAEQSFLYGNHVLKSGLGRITENTSQYQGVVVYSMADIPLGFGVAAKSTQDCRKVDPMAIVVFHQADIGEYVRHEETLT

SEQ ID NO: 1230 - protein, 276 aa, Homo sapiens
  SITE (57): Xaa equals any of the naturally occurring L-amino acids
  SITE (253): Xaa equals any of the naturally occurring L-amino acids
SAVVSGCRVRSCTSFSDEPMTGWMAAAVVTLMIRMCFSVYTMLSESCQRMVIVGYGXLLRRQAELDGMPAINAKRVYRIMRQNALLLERKPAVPPSKRAHTGRVAVKESNQRWCSDGFEFCCDNGERLRVTFALDCCDREALHWAVTTGGFNSETVQDVMLGAVERRFGNDLPSSPVEWLTDNGSCYRANETRQFARMLGLEPKNTAVRSPESNGIAESFVKTIKRDYISIMPKPDGLTAAKNLAEAFEHYNXWHPHSALGYRSPREYLRHGLVMG

SEQ ID NO: 1231 - protein, 296 aa, Homo sapiens
  SITE (6): Xaa equals any of the naturally occurring L-amino acids
KTIHLXTFIVLIRRLDCNFDIKVLNAQRAGYKAAIVHNVDSDDLISMGSNDIEVLKKIDIPSVFIGESSANSLKDEFTYEKGGHLILVPEFSLPLEYYLIPFLIIVGICLILIVIFMITKFVQDRHRARRNRLRKDQLKKLPVHKFKKGDEYDVCAICLDEYEDGDKLRILPCSHAYHCKCVDPWLTKTKKTCPVCKQKVVPSQGDSDSDTDSSQEENEVTEHTPLLRPLASVSAQSFGALSESRSHQNMTESSDYEEDDNEDTDSSDAENEINEHDVVVQLQPNGERDYNIANTV

SEQ ID NO: 1232 - protein, 69 aa, Homo sapiens
NQHKEYDKTPVGNPECSGPSCGLFYGFMKGPCPHGGDHGLACGVLGDGCLLSSSPHPASCWHLGEESSK

SEQ ID NO: 1233 - protein, 423 aa, Homo sapiens
LYRQDYNPKPKPSNEITREYIPKIGMTTYKIVPPKSLEISKDWQSETIEYKDDQDMHALGKKHTHENVKETAIQTEDSAISESPEEPLPNLKPKPNLRTEHQVPSSVSSPDDAMVSPLKPAPKMTRDTGTAPFAPNLEEINNILESKFKSRASNAQAKPSSFFLQMQKRVSGHYVTSAAAKSVHAAPNPAPKELTNKEAERDMLPSPEQTLSPLSKMPHSVPQPLVEKTDDDVIGQAPAEASPPPIAPKPVTIPASQVSTQNLKTLKTFGAPRPYSSSGPSPFALAVVKRSQSFSKERTESPSASALVQPPANTEEGKTHSVNKFVDIPQLGVSDKENNSAHNEQNSQIPTPTDGPSFTVMRQSSLTFQSSDPEQMRQSLLTAIRSGEAAAKLKRVTIPSNTISVNGRSRLSHSMSPDAQDGH

SEQ ID NO: 1234 - protein, 231 aa, Homo sapiens
  SITE (225): Xaa equals any of the naturally occurring L-amino acids
TAKKNHKKLTINPCEISGCPKPTQIIAGDRPDNHWLHYDSKTIPRTKKEWESSCFVEKTHWGYYTWPKNMVVYAGVEEQPKLGRSREDMTEAEQIIFDHFSDPKFVEQLITFLSLEDRKGKDKFNPRRFCLFKGIFRNFDDAFLPVLKPHLEHLVADSHESTQRCVAEIIAGLIRGSKHWTFEKVEKLWELLCPLLRTALSNITVETYNDWGACIATSCESRDPXETSLAF

SEQ ID NO: 1235 - protein, 302 aa, Homo sapiens
  SITE (2): Xaa equals any of the naturally occurring L-amino acids
  SITE (226): Xaa equals any of the naturally occurring L-amino acids
RXGIPGSTHASGAVALYFIDKLALRAGNEKEDGEAADTVGCCSLRVEHVQLHPEADGCQHVVEFDFLGKDCIRYYNRVPVEKPVYKNLQLFMENKDPRDDLFDRLTTTSLNKHLQELMDGLTAKVFRTYNASITLQEQLRALTRAEDSIAAKILSYNRANRVVAILCNHQRATPSTFEKSMQNLQTKIQAKKEQVAEARAELRRARAEHKAQGDGKSRSVLEKKRXLLEKLQEQLAQLSVQATDKEENKQVALGTSKLNYLDPRISIAWCKRFRVPVEKIYSKTQRERFAWALAMAGEDFEF

SEQ ID NO: 1236 - protein, 63 aa, Homo sapiens
AVLVSLEYLSDRIKLKLSGKLPVYILHLVYRLFCLAHKAFYYLSLCQHLRIKNFPDIQISDFN

SEQ ID NO: 1237 - protein, 239 aa, Homo sapiens
VYLLGSWLRRHSSYTEEMGEEANDDKKPTTKFELERETELRFEVEASQSVQLELLTGMAEIFGTELTRNKKFTFDAGAKVAVFTWHGCSVQLSGRTEVAYVSKDTPMLLYLNTHTALEQMRRQAEKEEERGPRVMVVGPTDVGKSTVCRLLLNYAVRLGRRPTYVELDVGQGSVSIPGTMGALYIERPADVEEGFSIQAPLVYHFGSTTPGTNIKLYNKITSRLADVFNQRCEVNRRHL

SEQ ID NO: 1238 - protein, 315 aa, Homo sapiens
LLTRNMDRLLRLGGGMPGLGQGPPTDAPAVDTAEQVYISSLALLKMLKHGRAGVPMEVMGLMLGEFVDDYTVRVIDVFAMPQSGTGVSVEAVDPVFQAKMLDMLKQTGRPEMVVGWYHSHPGFGCWLSGVDINTQQSFEALSERAVAVVVDPIQSVKGKVVIDAFRLINANMMVLGHEPRQTTSNLGHLNKPSIQALIHGLNRHYYSITINYRKNELEQKMLLNLHKKSWMEGLTLQDYSEHCKHNESVVKEMLELAKNYNKAVEEEDKMTPEQLAIKNVGKQDPKRHLEEHVDVLMTSNIVQCLAAMLDTVVFK

SEQ ID NO: 1239 - protein, 283 aa, Homo sapiens
  SITE (253): Xaa equals any of the naturally occurring L-amino acids
  SITE (259): Xaa equals any of the naturally occurring L-amino acids
LRGSDAGSGDEVAAGGSRAVAAAALPRSGRVGASGPASAPLHPRLAEPGFSAAAGLVRRSQVRGVHPLGRVLGARLGQRVVLVALAGRGAAAVPALHARQLPARLQLRRLRTAVHCALLPPGEWADLFQAAGAKYVVLTTKHHEGFTNWPSPVSWNWNSKDVGPHRDLVGELGTALRKRNIRYGLYHSLLEWFHPLYLLDKKNGFKTQHFVSAKTMPELYDLVNSYKPDLIWSDGEWECPDTYWNSTNFLSWXYNDSPXKVSVGSLRARTLFYSTWELSVCHM

SEQ ID NO: 1240 - protein, 180 aa, Homo sapiens
  SITE (4): Xaa equals any of the naturally occurring L-amino acids
  SITE (7): Xaa equals any of the naturally occurring L-amino acids
  SITE (175): Xaa equals any of the naturally occurring L-amino acids
TTSXERXLTGPEPLRRRRLCSRQLAPAAMPTTIEREFEELDTQRRWQPLYLEIRNESHDYPHRVAKFPENRNRNRYRDVSPYDHSRVKLQNAENDYINASLVDIEEAQRSYILTQGPLPNTCCHFWLMVWQQKTKAVVMLNRIVEKESSGETEQYLTFIILPGQNLESLESTSFXSQFLG

SEQ ID NO: 1241 - protein, 19 aa, Homo sapiens
SRDGVSPHWPGWSQTPDLK

SEQ ID NO: 1242 - protein, 133 aa, Homo sapiens
AFDLCYLYSWDLIRKMCFVVLDKLFHPLFPPQNTHTEQTPFHKSPHIHWQSPFASWSPCVPPKSIMFESLWWMLWGKVMIYTEATAKSVVQPLSPVKYCITPFGTTEKTVAFLQYSSLLHHFCINVETKHQNL

SEQ ID NO: 1243 - protein, 70 aa, Homo sapiens
PARCMPGPWPPYLAASCDSEIHPSRWQLLGLNLLEKKVPSQENSFYSGRNASETPQGSLNTQLQGRACGG

SEQ ID NO: 1244 - protein, 51 aa, Homo sapiens
  SITE (37): Xaa equals any of the naturally occurring L-amino acids
VYTLPSHKPIFKRSNAMTAILQEKKKLYSCGDVPHTXHQLQGVCPLQTPEP

SEQ ID NO: 1245 - protein, 111 aa, Homo sapiens
  SITE (48): Xaa equals any of the naturally occurring L-amino acids
  SITE (97): Xaa equals any of the naturally occurring L-amino acids
NAVFSITDLSLPNYLMASSVGLLPTQLLNSYLGTTLRTMEDVIAEQSXSGYFVFCLQIIISIGLMFYVVHRAQVELNAAIVACEMGTGNLLWLKGNXPNTSGLFHSTTRGP

SEQ ID NO: 1246 - protein, 223 aa, Homo sapiens
  SITE (184): Xaa equals any of the naturally occurring L-amino acids
  SITE (195): Xaa equals any of the naturally occurring L-amino acids
  SITE (198): Xaa equals any of the naturally occurring L-amino acids
  SITE (216): Xaa equals any of the naturally occurring L-amino acids
KQAGCSAAPGAVPPPEADSTSAGMSRRPCSCALRPPRCSCSASPSAVTAAGRPRPSDSCKEESSTLSVKMKCDFNCNHVHSGLKLVKPDDIGRLVSYTPAYLEGSCKDCIKDYERLSCIGSPIVSPRIVELETESKRLHNKENQHVQQTLNSTNEIEALETSRLYEDSAIPQFLYKVASVTMKXVAFWRRNSVTXYNXGWLQIQGPDPIFPTKNFXLARSFNF

SEQ ID NO: 1247 - protein, 54 aa, Homo sapiens
  SITE (7): Xaa equals any of the naturally occurring L-amino acids
LEKKDIXNMLMWRSPSYPKGEKQGKDPLHSKFPLGSPRAHCPQMHIISAEIQKP

SEQ ID NO: 1248 - protein, 77 aa, Homo sapiens
RFLSFVFGLNFSPRSLFVSSFCFSTVLVITLCWREPVSLWPPLPKLKQGPIIMSVSRTVPWSSHIPGPRLGPPSCVL

SEQ ID NO: 1249 - protein, 100 aa, Homo sapiens
NNICSQMVFLAVSPVVAMFRVVVLIYLGVHKTYLAGLFKKFRFLALYPGIASGGMGCGPGVITFINSGSETTERDCFIEWEVPRRKYNSVLSGGKWTLCT

SEQ ID NO: 1250 - protein, 47 aa, Homo sapiens
SNLMLTNLLCLLCCFLVPASAALQMQTILSYLAGLLFYFVGWMLPSS

SEQ ID NO: 1251 - protein, 193 aa, Homo sapiens
  SITE (7): Xaa equals any of the naturally occurring L-amino acids
  SITE (68): Xaa equals any of the naturally occurring L-amino acids
KPGSTGXVREGQPFEYFVYGAACSEVEIDCLTGDHKNIRTDIVMDVGCSINPAIDIGQIEGAFIQGMXLYTIEELNYSPQGILHTRGPDQYKIPAICDMPTELHIALLPPSQNSNTLYSSKGLGESGVFLGCSVFFAIHDAVSAARQERGLHGPLTLNSPLTPEKIRMACEDKFTKMIPRDEPGSYVPWNVPI

SEQ ID NO: 1252 - protein, 51 aa, Homo sapiens
GSSKGIFLLFSLFLGCSKFSRSSSRIRKRSIVRNRFWVLLKFACQHCITFP

SEQ ID NO: 1253 - protein, 696 aa, Homo sapiens
  SITE (5): Xaa equals any of the naturally occurring L-amino acids
  SITE (541): Xaa equals any of the naturally occurring L-amino acids
HEREXHGLGADCRAGRLVVMPGFLVRILLLLLVLLLLGPTRGLRNATQRMFEIDYSRDSFLKDGQPFRYISGSIHYSRVPRFYWKDRLLKMKMAGLNAIQTYVPWNFHEPWPGQYQFSEDHDVEYFLRLAHELGLLVILRPGPYICAEWEMGGLPAWLLEKESILLRSSDPDYLAAVDKWLGVLLPKMKPLLYQNGGPVITVQVENEYGSYFACDFDYLRFLQKRFRHHLGDDVVLFTTDGAHKTFLKCGALQGLYTTVDFGTGSNITDAFLSQRKCEPKGPLINSEFYTGWLDHWGQPHSTIKTEAVASSLYDILARGASVNLYMFIGGTNFAYWNGANSPYAAQPTSYDYDAPLSEAGDLTEKYFALRNIIQKFEKVPEGPIPPSTPKFAYGKVTLEKLKTVGAALDILCPSGPIKSLYPLTFIQVKQHYGFVLYRTTLPQDCSNPAPLSSPLNGVHDRAYVAVDGIPQGVLERNNVITLNITGKAGATLDLLVENMGRVNYGAYINDFKGLVSNLTLSSNILTDWTIFPLDTEDAVRXHLGGWGHRDSGHHDEAWAHNSSNYTLPAFYMGNFSIPSGIPDLPQDTFIQFPGWTKGQVWINGFNLGRYWPARGPQLTLFVPQHILMTSAPNTITVLELEWAPCSSDDPELCAVTFVDRPVIGSSVTYDHPSKPVEKRLMPPPPQKNKDSWLDHV

SEQ ID NO: 1254 - protein, 400 aa, Homo sapiens
  SITE (241): Xaa equals any of the naturally occurring L-amino acids
  SITE (372): Xaa equals any of the naturally occurring L-amino acids
TSSPSLASDLLLNMGAFLDKPKTEKHNAHGAGNGLRYGLSSMQGWRVEMEDAHTAVVGIPHGLEDWSFFAVYDGHAGSRVANYCSTHLLEHITTNEDFRAAGKSGSALELSVENVKNGIRTGFLKIDEYMRNFSDLRNGMDRSGSTAVGVMISPKHIYFINCGDSRAVLYRNGQVCFSTQDHKPCNPREKERIQNAGGSVMIQRVNGSLAVSRALGDYDYKCVDGKGPTEQLVSPEPEVYXILRAEEDEFIILACDGIWDVMSNEELCEYVKSRLEVSDDLENVCNWVVDTCLHKGSRDNMSIVLVCFSNAPKVSDEAVKKDSELDKHLESRVEEIMEKSGEEGMPDLAHVMRILSAENIPNLPPGGGLAGXRNVIEAVYSRLNPHRESDGGAGDLEDPW

SEQ ID NO: 1255 - protein, 155 aa, Homo sapiens
VARSAPPDGAVCAGPGSRRTEMAEQSDEAVKYYTLEEIQKHNHSKSTWLILHHKVYDLTKFLEEHPGGEEVLREQAGGDATENFEDVGHSTDAREMSKTFIIGELHPDDRPKLNKPPETLITTIDSSSSWWTNWVIPAISAVAVALMYRLYMAED

SEQ ID NO: 1256 - protein, 378 aa, Homo sapiens
  SITE (116): Xaa equals any of the naturally occurring L-amino acids
  SITE (184): Xaa equals any of the naturally occurring L-amino acids
QAFAKSYLGDTIEGTPAGTGPEFPGRPTRPRRKPTAAWSAKKSFQVSRTGLFLSKSGSTLTMWLYLAAFVGLYYLLHWYRERQVVSHLQDKYVFITGCDSGFGNLLARQLDARGLXVLAACLTEKGAEQLRGQTSDRLETVTLDVTKMESIAAATQWVKEHVGDRGLWGLVNNAGILTPITLCXWLNTEDSMNMLKVNLIGVIQVTLSMLPLVRRARGRIVNVSSILGRVAFFVGGYCVSKYGVEAFSDILRREIQHFGVKISIVEPGYFRTGMTNMTQSLERMKQSWKEAPKHIKETYGQQYFDALYNIMKEGLLNCSTNLNLVTDCMEHALTSVHPRTRYSAGWDAKFFFIPLSYLPTSLADYILTRSWPKPAQAV

SEQ ID NO: 1257 - protein, 75 aa, Homo sapiens
  SITE (63): Xaa equals any of the naturally occurring L-amino acids
KPQPLAYSSFNTRDLWLIWGRKTLKVISLGQRPYCTRGKKYILHLLLLQLCLKFICLVILSTXTNFLVYFKHLVG

SEQ ID NO: 1258 - protein, 261 aa, Homo sapiens
PSGIPGSTHASERKLPEEHARFYSAEISLALNYLHERGIIYRDLKLDNVLLDSEGHIKLTDYGMCKEGLRPGDTTSTFCGTPNYIAPEILRGEDYGFSVDWWALGVLMFEMMAGRSPFDIVGSSDNPDQNTEDYLFQVILEKQIRIPRSLSVKAASVLKSFLNKDPKERLGCHPQTGFADIQGHPFFRNVDWDMMEQKQVVPPFKPNISGEFGLDNFDSQFTNEPVQLTPDDDDIVRKIDQSEFEGFEYINPLLMSAEECV

SEQ ID NO: 1259 - protein, 115 aa, Homo sapiens
  SITE (3): Xaa equals any of the naturally occurring L-amino acids
  SITE (114): Xaa equals any of the naturally occurring L-amino acids
FGXGALLKLIFPDGAFESENRALINVQMLNNSGFARGIIEEFQNNNDLELQQKCINVLSTYAMIQGQIDANKEIGQFFIQTLTQLNVRPEILIEMTNSLFQFTGMPLTAIMEPXL

SEQ ID NO: 1260 - protein, 296 aa, Homo sapiens
  SITE (59): Xaa equals any of the naturally occurring L-amino acids
  SITE (124): Xaa equals any of the naturally occurring L-amino acids
  SITE (247): Xaa equals any of the naturally occurring L-amino acids
  SITE (270): Xaa equals any of the naturally occurring L-amino acids
  SITE (282): Xaa equals any of the naturally occurring L-amino acids
RPTRPRHAWAELRVVAMAASGAVEPGPPGAAVAPSPAPAPPPAPDHLFRPISAEDEEQXPTEIESLCMNCYCNGMTRLLLTKIPFFREIIVSSFSCEHCGWNNTEIQSAGRIQDQGVRYTLSVXALEDMNREVVKTDSAATRIPELDFEIPAFSQKGALTTVEGLITRAISGLEQDQPARRANKDATAERIDEFIVKLKELKQVASPFTLIIDDPSGNSFVENPHAPQKDDALVITHYNRTRQQEEXLGLQEEAPAEKPEEEDLRNEVLXFSTNCPECNVPXQTNMKLMVVLFAWK

SEQ ID NO: 1261 - protein, 53 aa, Homo sapiens
GGRGGRITGAREFKTSLGNIVKPSPQIIFKKLARHGGAACSPSYSGGLGGRIA

SEQ ID NO: 1262 - protein, 200 aa, Homo sapiens
  SITE (4): Xaa equals any of the naturally occurring L-amino acids
  SITE (6): Xaa equals any of the naturally occurring L-amino acids
  SITE (7): Xaa equals any of the naturally occurring L-amino acids
DSHXTXXPVDPRVREAGIPEFYDYDVALIKLKNKLKYGQTIRPICLPCTEGTTRALRLPPTTTCQQQKEELLPAQDIKALFVSEEEKKLTRKEVYIKNGDKKGSCERDAQYAPGYDKVKDISEVVTPRFLCTGGVSPYADPNTCRGDSGGPLIVHKRSRFIQVGVISWGVVDVCKNQKRQKQVPVTPETFTSTSFKCCPG

SEQ ID NO: 1263 - protein, 110 aa, Homo sapiens
  SITE (44): Xaa equals any of the naturally occurring L-amino acids
  SITE (81): Xaa equals any of the naturally occurring L-amino acids
  SITE (82): Xaa equals any of the naturally occurring L-amino acids
  SITE (90): Xaa equals any of the naturally occurring L-amino acids
  SITE (94): Xaa equals any of the naturally occurring L-amino acids
CARPHCHGPQIYSSKQSSHGTFPQGAVSPVEESDMTHHTDRKIXTNYEKNAEGRKNIGGPAAESRLTCRDLCWPGPVLGSXXHGIKSNKXTVCXHLTVWEKEQAPFTGFY

SEQ ID NO: 1264 - protein, 151 aa, Homo sapiens
FWPCRAFGIPIRVYTHEVVTLWYRSPEVLLGSARYSTPVDIWSIGTIFAELATKKPLFHGDSEIDQLFRIFRALGTPNNEVWPEVESLQDYKNTFPKWKPGSLASHVKNLDENGLDLLSKMLIYDPAKRISGKMALNHPYFNDLDNQIKKM

SEQ ID NO: 1265 - protein, 73 aa, Homo sapiens
  SITE (22): Xaa equals any of the naturally occurring L-amino acids
PEWWPDSRSPSSPRTPRSSSSXPYSPTHFPPPLLQAGSVFLLVPEALCSSPPSEPPYAGSCKAWLSADGSSQD

SEQ ID NO: 1266 - protein, 319 aa, Homo sapiens
  SITE (305): Xaa equals any of the naturally occurring L-amino acids
WQSILPFIQHKRSWRQSRTWCSHTERALKAVSDWIDEQEKGSSEQAESDNMDVPPEDDSKEGAGEQKTEHMTRTLRGVMRVGLVAKGLLLKGDLDLELVLLCKEKPTTALLDKVADNLAIQLAAVTEDKYEILQSVDDAAIVIKNTKEPPLSLTIHLTSPVVREEMEKVLAGETLSVNDPPDVLDRQKCLAALASLRHAKWFQARANGLKSCVIVIRVLRDLCTRVPTWGPLRGWPLELLCEKSIGTANRPMGAGEALRRVLECLASGIVMPDGSGIYDPCEKEATDAIGHLDRQQREDITQSAXPHCGSLPSASSIKS

SEQ ID NO: 1267 - protein, 119 aa, Homo sapiens
FGRVRPQRQAVTLLLLPLAMSTSTSCPIPGGRDQLPDCYSTTPGGTLYATTPGGTRIIYDRKFLLECKNSPIARTPPCCLPQIPGVTTPPTAPLSKLEELKEQETEEEIPDDAQFEMDI

SEQ ID NO: 1268 - protein, 329 aa, Homo sapiens
  SITE (3): Xaa equals any of the naturally occurring L-amino acids
  SITE (59): Xaa equals any of the naturally occurring L-amino acids
  SITE (307): Xaa equals any of the naturally occurring L-amino acids
  SITE (308): Xaa equals any of the naturally occurring L-amino acids
  SITE (314): Xaa equals any of the naturally occurring L-amino acids
  SITE (317): Xaa equals any of the naturally occurring L-amino acids
  SITE (323): Xaa equals any of the naturally occurring L-amino acids
  SITE (327): Xaa equals any of the naturally occurring L-amino acids
  SITE (328): Xaa equals any of the naturally occurring L-amino acids
  SITE (329): Xaa equals any of the naturally occurring L-amino acids
RCXGSARIEVCSAFGSMSAAVTAGKLARAPADPGKAGVPGVAAPGAPAAAPPAKEIPEXLVDPRSRRRYVRGRFLGKGGFAKCFEISDADTKEVFAGKIVPKSLLLKPHQREKMSMEISIHRSLAHQHVVGFHGFFEDNDFVFVVLELCRRRSLLELHKRRKALTEPEARYYLRQIVLGCQYLHRNRVIHRDLKLGNLFLNEDLEVKIGDFGLATKVEYDGERKKTLCGTPNYIAPEVLSKKGHSFEVDVWSIGCIMYTLLVGKPPFETSCLKETYLRIKKNEYSIPKHINPVAASLIQKMLQTDPXXRQPLTXCLXTSDLSXQKKXXX

SEQ ID NO: 1269 - protein, 144 aa, Homo sapiens
LQTNSFPVLLTQGLESNDFEMLNKVLQTRNVNLIKKTVLRMPLHTIIPLLQELTKRLQGHPNSAVLMVQWLKCVLTVHASYLSTLPDLVPQLGTLYQLMESRVKTFQKLSHLHGKLILLITQVTASEKTKGATSPGQKAKLVYE

SEQ ID NO: 1270 - protein, 84 aa, Homo sapiens
  SITE (38): Xaa equals any of the naturally occurring L-amino acids
NSARATLDEATPTLTNQSPTLTLQSTNTHTQSSSSSSXGGLFRSRPAHSLPPGEDGRVEPYVDFAEFYRLWSVDHGEQSVVTAP

SEQ ID NO: 1271 - protein, 123 aa, Homo sapiens
  SITE (28): Xaa equals any of the naturally occurring L-amino acids
  SITE (29): Xaa equals any of the naturally occurring L-amino acids
  SITE (58): Xaa equals any of the naturally occurring L-amino acids
  SITE (74): Xaa equals any of the naturally occurring L-amino acids
  SITE (82): Xaa equals any of the naturally occurring L-amino acids
LQAAGGHLTAAPGAVHGAAAVRFQAAAXXQEGVEAAPRPVSPQASLEERAVSRNPLCXLCLEERRHPTATPCGXLFCWECIXAWCSSKAECPLLPGESSLPRKLIYLRHYRLNRRPGWALDTN

SEQ ID NO: 1272 - protein, 86 aa, Homo sapiens
GTEKREKRLGSHHGEAGVSQLTSAGDSGVLVLPLSLPPRSSLAGLAEALLMNLTEGPLAMAEMDPTQGRVVFEDVAIYFSRRSGGT

SEQ ID NO: 1273 - protein, 72 aa, Homo sapiens
  SITE (60): Xaa equals any of the naturally occurring L-amino acids
  SITE (69): Xaa equals any of the naturally occurring L-amino acids
  SITE (72): Xaa equals any of the naturally occurring L-amino acids
IEPLLRLLRINHLLNRSAYQEGREGSQKEMLAPGPRSQGLLTPGVDFFSEVAPYKGNMAXAGTSTGRLXSGX

SEQ ID NO: 1274 - protein, 56 aa, Homo sapiens
HLTYSWHLVGTESMNRSYWLPIQRLVGVVIPIAESQLVNQQGFHLCCSPPPSPLEG

SEQ ID NO: 1275 - protein, 161 aa, Homo sapiens
LPGCRNSAQNCRLIFSKAKPSVLALCLLNLEVETLKSVELLEILLLVKKHSKINDTEFFYWRELVSKCLAEYSSPECCKPDLKKLVWIVSRRTAQNLHNSYYSVPELPTIPEGGCFDESESEDSCEDMSCGEESLSSSPPSDQECTFFFNFKVAQTLCFPS

SEQ ID NO: 1276 - protein, 49 aa, Homo sapiens
NNKSLLKKYIFFLLRALLAIGNLKISSPKQGPYQIFLDPPMLSVLATHC

SEQ ID NO: 1277 - protein, 89 aa, Homo sapiens
LNLLMSTILFLQDLPGLKRNYFPGPNTLVFYQHLIDLGKAECLTPACGILLWQAEQTNTDFNIQTKSKGMEKDTPSQNKESSYVNLRQS

SEQ ID NO: 1278 - protein, 199 aa, Homo sapiens
PQPLPPPTSMARHVFLTGPPGVGKTTLIHKASEVLKSSGVPVDGFYTEEVRQGGRRIGFDVVTLSGTRGPLSRVGLEPPPGKRECRVGQYVVDLTSFEQLALPVLRNADCSSGPGQRVCVIDEIGKMELFSQLFIQAVRQTLSTPGTIILGTIPVPKGKPLALVEEIRNRKDVKVFNVTKENRNHLLPDIVTCVQSSRK

SEQ ID NO: 1279 - protein, 183 aa, Homo sapiens
FGTEGAMAVANSSPVNPVVFFDVSIGGQEVGRMKIELFADVVPKTAENFRQFCTGEFRKDGVPIGYKGSTFHRVIKDFMIQGGDFVNGDGTGVASIYRGPFADENFKLRHSAPGLLSMANSGPSTNGCQFFITCSKCDWLDGKHVVFGKIIDGLLVMRKIENVPTGPNNKPKLPVVISQCGEM

SEQ ID NO: 1280 - protein, 62 aa, Homo sapiens
  SITE (17): Xaa equals any of the naturally occurring L-amino acids
NFCWNIINGSIPKDTWXLLLDFSTMIADDMSNYDEEGAWPVLIDDFVEFARPQIAGTKSTTV

SEQ ID NO: 1281 - protein, 38 aa, Homo sapiens
CSFIILIILGPLEFAESTLPVLYKWNNKAWMTACLFTS

SEQ ID NO: 1282 - protein, 515 aa, Homo sapiens
SSFFSFLAAAPGSSRRAAPVLRPEMNPAAEAEFNILLATDSYKVTHYKQYPPNTSKVYSYFECREKKTENSKLRKVKYEETVFYGLQYILNKYLKGKVVTKEKIQEAKDVYKEHFQDDVFNEKGWNYILEKYDGHLPIEIKAVPEGFVIPRGNVLFTVENTDPECYWLTNWIETILVQSWYPITVATNSREQKKILAKYLLETSGNLDGLEYKLHDFGYRGVSSQETAGIGASAHLVNFKGTDTVAGLALIKKYYGTKDPVPGYSVPAAEHSTITAWGKDHEKDAFEHIVTQFSSVPVSVVSDSYDIYNACEKIWGEDLRHLIVSRSTQAPLIIRPDSGNPLDTVLKVLEILGKKFPVTENSKGYKLLPPYLRVIQGDGVDINTLQEIVEGMKQKMWSIENIAFGSGGGLLQKLTRDLLNCSFKCSYVVTNGLGINVFKDPVADPNKRSKKGRLSLHRTPAGNFVTLEEGKGDLEEYGQDLLHTVFKNGKVTKSYSFDEIRKNAQLNIELEAAHH

SEQ ID NO: 1283 - protein, 88 aa, Homo sapiens
RRLHLFLLSLLGMLTASGNSELNICFVRKYLFFYFEVWQPSCYPKAKPLCQESNKCLESKHDVSIVQPPFSWLFKGCTSCIKGYFMLK

SEQ ID NO: 1284 - protein, 17 aa, Homo sapiens
FCIFSRDGVSPCWSDWS

SEQ ID NO: 1285 - protein, 515 aa, Homo sapiens
  SITE (74): Xaa equals any of the naturally occurring L-amino acids
  SITE (97): Xaa equals any of the naturally occurring L-amino acids
  SITE (126): Xaa equals any of the naturally occurring L-amino acids
  SITE (135): Xaa equals any of the naturally occurring L-amino acids
GCSLHLWASLARHAGQCLPAPFATSSALRGLELGERAGGLVGWPGLRPAATTILWPGRCEWSAGQSARCLAPQXIPPSTPGSSDVGQLCAGACDPRXGLGAASIAADGAPRGPGEYQPGKGSARPXTADPGRAGXTEVREPAGSSAQQRPKTRRVAPLKDLPVNDEHVTVPPWKANSKQPAFTIHVDEAEKEAQKKPAESQKIEREDALAFNSAISLPGPRKPLVPLDYPMDGSFESPHTMDMSIVLEDEKPVSVNEVPDYHEDIHTYLREMEVKCKPKVGYMKKQPDITNSMRAILVDWLVEVGEEYKLQNETLHLAVNYIDRFLSSMSVLRGKLQLVGTAAMLLASKFEEIYPPEVAEFVYITDDTYTKKQVLRMEHLVLKVLTFDLAAPTVNQFLTQYFLHQQPANCKVESLAMFLGELSLIDADPYLKYLPSVIAGAAFHLALYTVTGQSWPESLIRKTGYTLESLKPCLMDLHQTYLKAPQHAQQSIREKYKNSKYHGVSLLNPPETLNL

SEQ ID NO: 1286 - protein, 108 aa, Homo sapiens
  SITE (85): Xaa equals any of the naturally occurring L-amino acids
  SITE (96): Xaa equals any of the naturally occurring L-amino acids
  SITE (102): Xaa equals any of the naturally occurring L-amino acids
  SITE (107): Xaa equals any of the naturally occurring L-amino acids
RPACPSQERPPPSQQMRQGCLALPKSESLPSGICRSAQGSRRSRGAGAAGPQPPLERADVLNVSPGRCLPHQWKLSSCCKTWLFXESFEIHRSTYXVHQRTXGAGVXP

SEQ ID NO: 1287 - protein, 214 aa, Homo sapiens
  SITE (164): Xaa equals any of the naturally occurring L-amino acids
  SITE (193): Xaa equals any of the naturally occurring L-amino acids
  SITE (203): Xaa equals any of the naturally occurring L-amino acids
  SITE (207): Xaa equals any of the naturally occurring L-amino acids
  SITE (210): Xaa equals any of the naturally occurring L-amino acids
  SITE (211): Xaa equals any of the naturally occurring L-amino acids
QVRFPAEEASSPAPWHPKAAARALPQALANGAQLLLLGSAGPTMENQVQTLTSYLWSRHLPVEPEELQRRARHLEKKFLENPDLSQTEEKLRGAVLHALRKTTYHWQELSYTEGLSLVYMAARLDGGFAAVSRAFHEIRARNPAFQPQTLMDFGSGTGLSPGLXTVFGARAYVNIWCGQITCMWFAENSERGXIGSLYSGLFXSSTXNQXXLMI

SEQ ID NO: 1288 - protein, 68 aa, Homo sapiens
  SITE (1): Xaa equals any of the naturally occurring L-amino acids
  SITE (11): Xaa equals any of the naturally occurring L-amino acids
XSLNCGSISTXTNQGSPLSVGYHFPLLPPVIFTFSTTGELMGSEGQMYFLFGHRGFPVLCVFLMKESL

SEQ ID NO: 1289 - protein, 318 aa, Homo sapiens
RLQVVQQWIQRIRQRPGCLWLLAVALLPWTCASRALQHLDPPAPLPLVIWHGMGDSCCNPLSMGAIKKMVEKKIPGIYVLSLEIGKTLMEDVENSFFLNVNSQVTTVCQALAKDPKLQQGYNAMGFSQGGQFLRAVAQRCPSPPMINLISVGGQHQGVFGLPRCPGESSHICDFIRKTLNAGAYSKVVQERLVQAEYWHDPIKEDVYRNHSIFLADINQERGINESYKKNLMALKKFVMVKFLNDSIVDPVDSEWFGFYRSGQAKETIPLQETSLYTQDRLGLKEMDNAGQLVFLATEGDHLQLSEEWFYAHIIPFLG

SEQ ID NO: 1290 - protein, 119 aa, Homo sapiens
KHMGSCRLLLCFFPLSRWPGRDTTFCNQGTENRRACSQQANSLRYKITYRSCLRMVTDRPDCLGHRNTSCFPLKKVLPEAFCLSAPCWSEVQADENPDIACGGLQLRKVGREIILVLVQ

SEQ ID NO: 1291 - protein, 47 aa, Homo sapiens
  SITE (21): Xaa equals any of the naturally occurring L-amino acids
  SITE (34): Xaa equals any of the naturally occurring L-amino acids
  SITE (42): Xaa equals any of the naturally occurring L-amino acids
ISDPYSQGYNYSKKYIQGKLXLISSLTYRGNKTXVLQIGLQXHHCSG

SEQ ID NO: 1292 - protein, 275 aa, Homo sapiens
GGASNFLSWRESARWSRQLRRTLIRLSFPISCGRSHAFGGCKMAATSGTDEPVSGELVSVAHALSLPAESYGNDPDIEMAWAMRAMQHAEVYYKLISSVDPQFLKLTKVDDQIYSEFRKNFETLRIDVLDPEELKSESAKEKWRPFCLKFNGIVEDFNYGTLLRLDCSQGYTEENTIFAPRIQFFAIEIARNREGYNKAVYISVQDKEGEKGVNNGGEKRADSGEEENTKNGGEKGADSGEEKEEGINREDKTDKGGEKGKEADKEINKSGEKAM

SEQ ID NO: 1293 - protein, 263 aa, Homo sapiens
  SITE (32): Xaa equals any of the naturally occurring L-amino acids
  SITE (86): Xaa equals any of the naturally occurring L-amino acids
QIHGQVVGTVTCKCDLEGIMPNVTISLSLPTXGSPLQDILVHPCVTSLDSAILTSSSIDAMDDSAFSGPYKFPFTPPLESFNLCFXTSQVPVPPILGFYQMKEEEVQLRITINLKLHESVKNNFEFCEAHIPFYNRGPITHLEYKTSFGQLEVFREKSLLIWIIGQKFPKSMEISLSGTVTFGAKSHEKQPFDPICTGETAYLKLHFRILDYTLTGCYADQHSVQVFASGKPKISAHRKLISSDYYIWNSKAPAPVTYGSLLL

SEQ ID NO: 1294 - protein, 120 aa, Homo sapiens
  SITE (89): Xaa equals any of the naturally occurring L-amino acids
PTRPPTRPPTRPRSCLVMSGRGKGGKGLGKGGAKRHRKVLRDNIQGITKPAIRRLARRGGVKRISGLIYEETRGVLKVFLENVIRDAVXYTEHAKRKTVTAMDVVYALKRQGRTLYGFGG

SEQ ID NO: 1295 - protein, 174 aa, Homo sapiens
  SITE (43): Xaa equals any of the naturally occurring L-amino acids
  SITE (44): Xaa equals any of the naturally occurring L-amino acids
  SITE (155): Xaa equals any of the naturally occurring L-amino acids
  SITE (158): Xaa equals any of the naturally occurring L-amino acids
  SITE (160): Xaa equals any of the naturally occurring L-amino acids
  SITE (168): Xaa equals any of the naturally occurring L-amino acids
KTGNGRVYPHPQDLLAALPLALVLLAMRLAFEKIHWPAPEPVXXCEGSDQEASEAQRHAGETLPHGRAQAKEPQLSLLAAQCGLTLQQTQRWFRRRRNQDRPQLTKKFCEASWRFLFYLSSFVGGLSVLYHESWLWAPVMCWDRYPNQTLKPSLXWWXLXGAGFLTSXCLIRCL

SEQ ID NO: 1296 - protein, 286 aa, Homo sapiens
AHSSIPAKHRNMTEMSFLSSEVLVGDLMSPFDQSGLGAEESLGLLDDYLEVAKHFKPHGFSSDKAKAGSSEWLAVDGLVSPSNNSKEDAFSGTDWMLEKMDLKEFDLDALLGIDDLETMPDDLLTTLDDTCDLFAPLVQETNKQPPQTVNPIGHLPESLTKPDQVAPFTFLQPLPLSPGVLSSTPDHSFSLELGSEVDITEGDRKPDYTAYVAMIPQCIKEEDTPSDNDSGICMSPESYLGSPQHSPSTRGSPNRSLPSSRCSLWVCPSQTLRSSWREDGSSKSKG

SEQ ID NO: 1297 - protein, 169 aa, Homo sapiens
AARGRAAAEHPAGADSMASPDPPATSYAPSDVPSGVALFLTIPFAFFLPELIFGFLVWTMVAATHIVYPLLQGWVMYVSLTSFLISLMFLLSYLFGFYKRFESWRVLDSLYHGTTGILYMSAAVLQVHATIVSEKLLDPRIYYINSAASFFAFIATLLYILHAFSIYYH

SEQ ID NO: 1298 - protein, 164 aa, Homo sapiens
ALRNEMAVLWRLSAVCGALGGRALLLRTPVVRPAHISAFLQDRPIPEWCGVQHIHLSPSHHSGSKAASLHWTSERVVSVLLLGLLPAAYLNPCSAMDYSLAAALTLHGHWGLGQVVTDYVHGDALQKAAKAGLLALSALTFAGLCYFNYHDVGICKAVAMLWKL

SEQ ID NO: 1299 - protein, 717 aa, Homo sapiens
  SITE (39): Xaa equals any of the naturally occurring L-amino acids
  SITE (147): Xaa equals any of the naturally occurring L-amino acids
  SITE (181): Xaa equals any of the naturally occurring L-amino acids
  SITE (232): Xaa equals any of the naturally occurring L-amino acids
  SITE (379): Xaa equals any of the naturally occurring L-amino acids
  SITE (389): Xaa equals any of the naturally occurring L-amino acids
  SITE (671): Xaa equals any of the naturally occurring L-amino acids
VCLQRDAPRGQARSPGEAQEPEELARRQRRHPELSQGEXVASVIIYRTLAGLLPHNYDPDKRSLRVPKRPIINTPVVSISVHDDEELLPRALDKPVTVQFRLLETEERTKPICVFWNHSILVSGTGGWSARGCEVVFRNESHVSCQXNHMTSFAVLMDVSRRENGEILPLKTLTYVALGVXLAALLLTFFFLTLLRILRSNQHGIRRNLTAALGLAQLVFLLGINQADLPFXCTVIAILLHFLYLCTFSWALLEALHLYRALTEVRDVNTGPMRFYYMLGWGVPAFITGLAVGLDPEGYGNPDFCWLSIYDTLIWSFGGPVAFAVSMSVFLYILAARASCAAQRQGFEKKGPVSGLQPSFAVLLLLSATWLLALLSVNXDTLLFHYLFXTCNCIQGPFIFLSYVVLSKEVRKALKLACSRKPSPDPALTTKSTLTSSYNCPSPYADGRLYQPYGDSAGSLHSTSRSGKSQPSYIPFLLREESALNPGQGPPGLGDPGSLFLEGQDQQHDPDTDSDSDLSLEDDQSGSYASTHSSDSEEEEEEEEEEAAFPGEQGWDSLLGPGAERLPLHSTPKDGGPGPGKAPWPGDFGTTAKESSGNGAPEERLRENGDALSREGSLGPLPGSSAQPHKGILKKKCLPTISEKSSLLRLPLEQCTGSSRGSSASEGSRGXPPPRPPPRQSLQEQLNGVMPIAMSIKAGTVDEDSSGSEFLFFNFLH

SEQ ID NO: 1300 - protein, 145 aa, Homo sapiens
  SITE (25): Xaa equals any of the naturally occurring L-amino acids
  SITE (31): Xaa equals any of the naturally occurring L-amino acids
  SITE (111): Xaa equals any of the naturally occurring L-amino acids
  SITE (112): Xaa equals any of the naturally occurring L-amino acids
  SITE (116): Xaa equals any of the naturally occurring L-amino acids
  SITE (124): Xaa equals any of the naturally occurring L-amino acids
  SITE (125): Xaa equals any of the naturally occurring L-amino acids
ASRNADLSITLGTSLQIRPSGNLPXATKRRXGRLVIVNLQPTKHDRHADLRIHGYVDEVMTRLMKHLGLEIPAWDGPRVLERALPPLPARPPPSWSPRRNLPPGSTALSPXXPSRXPAPSTTAXXPPAPNGSGPPALPPTDPPKG

SEQ ID NO: 1301 - protein, 68 aa, Homo sapiens
  SITE (67): Xaa equals any of the naturally occurring L-amino acids
  SITE (68): Xaa equals any of the naturally occurring L-amino acids
TRCLLKIQKISQVWWHNAVIPATQEAEAGESLEPGRWEVTVSQVCATAFQPGLIEWDFRLQKKKKKXX

SEQ ID NO: 1302 - protein, 60 aa, Homo sapiens
KYPVPRPLFTHACKFTGKTLETNVLSSTEIWPSSLFLNCSLCVRHICLIPHSALTFRQIR

SEQ ID NO: 1303 - protein, 107 aa, Homo sapiens [sequence omitted]

SEQ ID NO: 1304 - protein, 69 aa, Homo sapiens
KHIFWLAEKNKTKLLFLFLALRVYSKRDFFELFLYYFSFNCAVVHETELLCFSVRDGKGFFSISFMCGI

SEQ ID NO: 1305 - protein, 75 aa, Homo sapiens
KNVIGTINKDCERLFKSCESLKPISQGVPCLNLLLFPQRTKPVHKLPKLPFWRWKLTRREGLLLESIQYKQIILP

SEQ ID NO: 1306 - protein, 44 aa, Homo sapiens
PTWRNPVSTKNTKISWALWRAPVIPATWEAEAEESLKPRRRRLQ

SEQ ID NO: 1307 - protein, 105 aa, Homo sapiens
RLCAFNKRMTFQFNFTIEDHLENELTPIRDGALTLDSSKELSVSESQKGEERDRKCSAEQFDLPQDHLWEHKSMENAAPSQDTDSPLSAASSSRNLGATWENSPP

SEQ ID NO: 1308 - protein, 75 aa, Homo sapiens
  SITE (13): Xaa equals any of the naturally occurring L-amino acids
GRAHAITVSVANXKALAKCEKYMLTHQELASDGEIETKLIKGDIYKTRGGGQSVQFTDIETLKQESPNGVLWLWR

SEQ ID NO: 1309 - protein, 231 aa, Homo sapiens
  SITE (178): Xaa equals any of the naturally occurring L-amino acids
LERFASRRPQVLAVRTVCDLVLGKMDKDCEMKRTTLDSPLGKLELSGCEQGLHEIKLLGKGTSAADAVEVPAPAAVLGGPEPLMQCTAWLNAYFHQPEAIEEFPVPALHHPVFQQESFTRQVLWKLLKVVKFGEVISYQQLAALAGNPKAARAVGGAMRGNPVPILIPCHRVVCSSGXVGNYSGGLAVKEWLLAHEGHRLGKPGLGGSSGLAGAWLKGAGATSGSPPAGRN

SEQ ID NO: 1310 - protein, 110 aa, Homo sapiens
PVLTPATLIYFSINCLSGSQSWNHHSGRGLACTRMFEVVSSTSGLSICGERCVAIAAGLHGHLSTTRVLWTWSNHRERLRVEFCLCRGTGAVWWERPVPGETLETLREPL

SEQ ID NO: 1311 - protein, 139 aa, Homo sapiens
  SITE (6): Xaa equals any of the naturally occurring L-amino acids
AVVTAXQVPKQVSWVQQDTPPFQGSWYRQKQEWVLSCCRHTAVVFLQLSNKRLSHRPELPWYVVKSKTSSLGYLSSFMKQVLRTRKNHLPPSFVRQNQVKGNMLENVPREDTSTFALSNPSSEKGVPWPQKELPSFGEE

SEQ ID NO: 1312 - protein, 231 aa, Homo sapiens
AEAEVTPPEEQQEAEEPKARVLRSKSLCHDEIENLLDSDHRELIGDYSKAFLLQTVDGKHQDLKYISPETMVALLTGKFSNIVDKFVIVDCRYPYEYEGGHIKTAVNLPLERDAESFLLKSPIAPCSLDKRVILIFHCEFSSERGPRMCRFIRERDRAVNDYPSLYYPEMYILKGGYKEFFPQHPNFCEPQDYRPMNHEAFKDELKTFRLKTRSWAGERSRRELCSRLQDQ

SEQ ID NO: 1313 - protein, 312 aa, Homo sapiens
AAVIPSLGFLPGLPRARSRAGPEQPKMADFDDRVSDEEKVRIAAKFITHAPPGEFNEVFNDVRLLLNNDNLLREGAAHAFAQYNMDQFTPVKIEGYEDQVLITEHGDLGNSRFLDPRNKISFKFDHLRKEASDPQPEEADGGLKSWRESCDSALRAYVKDHYSNGFCTVYAKTIDGQQTIIACIESHQFQPKNFWNGRWRSEWKFTITPPTAQVVGVLKIQVHYYEDGNVQLVSHKDVQDSLTVSNEAQTAKEFIKIIENAENEYQTAISENYQTMSDTTFKALRRQLPVTRTKIDWNKILSYKIGKEMQNA

SEQ ID NO: 1314 - protein, 260 aa, Homo sapiens
  SITE (234): Xaa equals any of the naturally occurring L-amino acids
  SITE (246): Xaa equals any of the naturally occurring L-amino acids
  SITE (249): Xaa equals any of the naturally occurring L-amino acids
  SITE (256): Xaa equals any of the naturally occurring L-amino acids
AFNALVTFCIRDLIGCLQKLLFGKVAKDSSRMLQPSSSPLWGKLRVDIKAYLGSAIQLVSCLSETTVLAAVLRHISVLVPCFLTFPKQCRMLLKRMVVVWSTGEESLRVLAFLVLSRVCRHKKDTFLGPVLKQMYITYVRNCKFTSPGALPFISFMQWTLTELLALEPGVAYQHAFLYIRQLAIHLRNAMTTRKKETYQSVYNWQYVHCLFLWCRVLSTAGPSEASSPWSNPLXPSHHWLYQAHPXCPXLTRCECXASVA

SEQ ID NO: 1315 - protein, 194 aa, Homo sapiens
  SITE (158): Xaa equals any of the naturally occurring L-amino acids
  SITE (160): Xaa equals any of the naturally occurring L-amino acids
  SITE (174): Xaa equals any of the naturally occurring L-amino acids
  SITE (175): Xaa equals any of the naturally occurring L-amino acids
  SITE (183): Xaa equals any of the naturally occurring L-amino acids
  SITE (189): Xaa equals any of the naturally occurring L-amino acids
  SITE (193): Xaa equals any of the naturally occurring L-amino acids
RSRLWAPVRESHTYLRMPGLSCRFYQHKFPEVEDVVMVNVRSIAEMGAYVSLLEYNNIEGMILLSELSRRRIRSINKLIRIGRNECVVVIRVDKEKGYIDLSKRRVSPEEAIKCEDKFTKSKTVYSILRHVAEVLEYTKDEQLESLFQRTAWVFDDKXKXPGYGAYDAFKHAAXXPSNFGKVXIGMKIXRERXH

SEQ ID NO: 1316 - protein, 59 aa, Homo sapiens
  SITE (8): Xaa equals any of the naturally occurring L-amino acids
  SITE (12): Xaa equals any of the naturally occurring L-amino acids
  SITE (23): Xaa equals any of the naturally occurring L-amino acids
  SITE (24): Xaa equals any of the naturally occurring L-amino acids
  SITE (35): Xaa equals any of the naturally occurring L-amino acids
  SITE (44): Xaa equals any of the naturally occurring L-amino acids
  SITE (55): Xaa equals any of the naturally occurring L-amino acids
  SITE (58): Xaa equals any of the naturally occurring L-amino acids
AKISQEKXFHKXMSSVKARTGHXXFFCGGMSSVKXGQGIFTSFXILQLLQAIWAXTCXS

SEQ ID NO: 1317 - protein, 194 aa, Homo sapiens
  SITE (5): Xaa equals any of the naturally occurring L-amino acids
GCGDXRAATTTALISVVTTASAGGEDESSRIELGDVTPHNIKQLKRLNQVIFPVSYNDKFYKDVLEVGELAKLAYFNDIAVGAVCCRVDHSQNQKRLYIMTLGCLAPYRRLGIGTKMLNHVLNICEKDGTFDNIYLHVQISNESAIDFYRKFGFEIIETKKNYYKRIEPADAHVLQKNLKVPSGQNADVQKTDN

SEQ ID NO: 1318 - protein, 60 aa, Homo sapiens
  SITE (9): Xaa equals any of the naturally occurring L-amino acids
  SITE (41): Xaa equals any of the naturally occurring L-amino acids
THLFVLLPXDTFSTSCPSTVRHIQAPRSWSPNTLKNHEFIXMVSQSPNQPNQTCYLVLLG

SEQ ID NO: 1319 - protein, 106 aa, Homo sapiens
  SITE (57): Xaa equals any of the naturally occurring L-amino acids
  SITE (61): Xaa equals any of the naturally occurring L-amino acids
ARPPAARTGVAGGGAPVRKPGIRGHDGAGPRLLAAPRPPWPSAGVGQKHSTLRKGTXRARXCVPGLSEQRCEDQQREEIPSSRGCHCLPPHLSPSTVIFFIYIMTH

SEQ ID NO: 1320 - protein, 402 aa, Homo sapiens
  SITE (6): Xaa equals any of the naturally occurring L-amino acids
GTREPXLLAELKPGRPHQFDWKSSCETWSVAFSPDGSWFAWSQGHCIVKLIPWPLEEQFIPKGFEAKSRSSKNETKGRGSPKEKTLDCGQIVWGLAFSPWPSPPSRKLWARHHPQVPDVSCLVLATGLNDGQIKIWEVQTGLLLLNLSGHQDVVRDLSFTPSGSLILVSASRDKTLRIWDLNKHGKQIQVLSGHLQWVYCCSISPDCSMLCSAAGEKSVFLWSMRSYTLIRKLEGHQSSVVSCDFSPDSALLVTASYDTNVIMWDPYTGERLRSLHHTQVDPAMDDSDVHISSLRSVCFSPEGLYLATVADDRLLRIWALELKTPIAFAPMTNGLCCTFFPHGGVIATGTRDGHVQFWTAPRVLSSLKHLCRKALRSFLTTYQVLALPIPKKMKEFLTYRTF

SEQ ID NO: 1321 - protein, 88 aa, Homo sapiens
VWQGTLLLASPPRREVDMTSPPPHQGWEQRGCGESQVPLALSRVFSTSHYCLLLVANQSIFFPCLWAVESAAGCTLHLPTELGKEDNQ

SEQ ID NO: 1322 - protein, 284 aa, Homo sapiens
  SITE (232): Xaa equals any of the naturally occurring L-amino acids
  SITE (237): Xaa equals any of the naturally occurring L-amino acids
  SITE (250): Xaa equals any of the naturally occurring L-amino acids
  SITE (262): Xaa equals any of the naturally occurring L-amino acids
  SITE (265): Xaa equals any of the naturally occurring L-amino acids
  SITE (269): Xaa equals any of the naturally occurring L-amino acids
RTRGGRVGAYEHPGSSLFPEGPNDYVFSHLPLHSQQQVRAPIPMVPVGGIQMVHSMPPALSSLHPSPTLPLPMEGFEEKKGASGESFSKDPYVLSKQHEKRGPHALQSSGPPSTPSSPRLLMKQSTSEDSLNATEREQEENIQTCTKAIASLRIATEEAALLGPDQPARVQEPHQNPLGSAHVSIRHFSRPEPGQPCTSATHPDLHDGEKDNFGTSQTPLAHSTFYSKSCVXDKQLXFSQQQGNFLSSTXGKQRSFLQEKSXAYXGLLXGWGDFPFPTFFPFFF

SEQ ID NO: 1323 - protein, 278 aa, Homo sapiens
ALKVLCFFFPILTQHYWCFLYDFPLILSDVMTEAHHKYDHSEATGSSSWDIQNSFRREKLEQKSPDSKTLQEDSPGVRQRVYECQECGKSFRQKGSLTLHERIHTGQKPFECTHCGKSFRAKGNLVTHQRIHTGEKPYQCKECGKSFSQRGSLAVHERLHTGQKPYECAICQRSFRNQSNLAVHRRVHSGEKPYRCDQCGKAFSQKGSLIVHIRVHTGLKPYACTQCRKSFHTRGNCILHGKIHTGETPYLCGQCGKSFTQRGSLAVHQRSCSQRLTL

SEQ ID NO: 1324 - protein, 248 aa, Homo sapiens
GTSWSRPFRQCFQTPWERGCRVRSSVCTARGRAQQRMSGTLEKVLCLRNNTIFKQAFSLLRFRTSGEKPIYSVGGILLSISRPYKTKPTHGIGKYKHLIKAEEPKKKKGKVEVRAINLGTDYEYGVLNIHLTAYDMTLAESYAQYVHNLCNSLSIKVEESYAMPTKTIEVLQLQDQGSKMLLDSVLTTHERVVQISGLSATFAEIFLEIIQSSLPEGVRLSVKEHTEEDFKGRFKARPELEELLAKLK

SEQ ID NO: 1325 - protein, 139 aa, Homo sapiens
PGSTHASAHASARPTRKMAPQKDRKPKRSTWRFNLDLTHPVEDGIFDSGNFEQFLREKVKVNGKTGNLGNVVHIERFKNKITVVSEKQFSKRYLKYLTKKYLKKNNLRDWLRVVASDKETYELRYFQISQDEDESESED

SEQ ID NO: 1326 - protein, 356 aa, Homo sapiens
IPTRPRTRGSLGSAVKLRTFAENYPIPEPGPNEVLLRMHSVGICGSDVHYWEYGRIGNFIVKKPMVLGHEASGTVEKVGSSVKHLKPGDRVAIEPGAPRENDEFCKMGRYNLSPSIFFCATPPDDGNLCRFYKHNAAFCYKLPDNVTFEEGALIEPLSVGIHACRRGGVTLGHKVLVCGAGPIGMVTLLVAKAMGAAQVVVTDLSATRLSKAKEIGADLVLQISKESPQEIARKVEGQLGCKPEVTIECTGAEASIQAGIYATRSGGTLVLVGLGSEMTTVPLLHAAIREVDIKGVFRYCNTWPVAISMLASKSVNVKPLVTHRFPLEKALEAFETFKKGLGLKIMLKCDPSDQNP

SEQ ID NO: 1327 - protein, 107 aa, Homo sapiens
MDAILNYRSEDTEDYYTLLGCDELSSVEQILAEFKVRALECHPDKHPENPKAVETFQKLQKAKEILTNEESRARYDHWRRSQMSMPFQQWEALNDSVKTVGFSLGAT

SEQ ID NO: 1328 - protein, 110 aa, Homo sapiens
  SITE (1): Xaa equals any of the naturally occurring L-amino acids
XVSLAALKKALAAAGYDVEKNNSRIKLGLKSLVSKGTLVQTKGTGASGSFKLNKKAASGEAKPKVKKAGGTKPKKPVGAAKKPKKAAGGATPKKSAKKTPKKAKKPPRPL

SEQ ID NO: 1329 - protein, 292 aa, Homo sapiens
  SITE (20): Xaa equals any of the naturally occurring L-amino acids
  SITE (145): Xaa equals any of the naturally occurring L-amino acids
  SITE (207): Xaa equals any of the naturally occurring L-amino acids
LGLICQALWFPSYFRGCYGXLGGRPHMGRGWVVDGVSVVSCGRVILLLFLFTFFPLHKPKSFHLVSTVWTVLELGACQKNLGLGKPQVADMVKQRNCSSGSCTTSEGQKPSPGRRRVFRSQTFGEKAAPSLLGDRHSACVPQLGXAGSLTYEAWRSSHCPHYGQRGDPAGPLGQTGANTASHPLWLLAMPQVPKKMEDPCARSQPGXPEGQCPSEDRSERIKFPVGPLSPLGCVFQLLTFQRGPSRSPAGFPQGLPLRWEWISTRAFDFGQIGPHSHRFSCQGPWTGGWCFL

SEQ ID NO: 1330 - protein, 130 aa, Homo sapiens
RRRWLARLGEGVSKMMLQHPGQVSASEVSASAIVPCLSPPGSLVFEDFANLTPFVKEELRFAIQNKHLCHRMSSALESVTVSDRPLGVSITKAEVAPEEDERKKRRRERNKIAAAKCRNKKKEKTDACRK

SEQ ID NO: 1331 - protein, 232 aa, Homo sapiens
  SITE (168): Xaa equals any of the naturally occurring L-amino acids
  SITE (186): Xaa equals any of the naturally occurring L-amino acids
  SITE (187): Xaa equals any of the naturally occurring L-amino acids
  SITE (199): Xaa equals any of the naturally occurring L-amino acids
  SITE (202): Xaa equals any of the naturally occurring L-amino acids
  SITE (209): Xaa equals any of the naturally occurring L-amino acids
GKLVRLQVPVRNSRVDPRVRAENRSWKCLLAARGEERGASIMAEQDVENDLLDYDEEEEPQAPQESTPAPPKKDIKGSYVSIHSSGFRDFLLKPELLRAIVDCGFEHPSEVQHECIPQAILGMDVLCQAKSGMGKTAVFVLATLQQIEPVNGQVTVLVMCHTRELAFXISKEYERFSKYMPSVKVXXSARLDQAPLGFXSFXSLGSGPXSIYQAWQGQLPLKVCSGFCSLKA

SEQ ID NO: 1332 - protein, 63 aa, Homo sapiens
  SITE (7): Xaa equals any of the naturally occurring L-amino acids
GHGEQRXHGREVNALKSKLRRGNETSFVPSRRSGGRRVIENADGSEEETDTRDADFNGTKASE

SEQ ID NO: 1333 - protein, 175 aa, Homo sapiens
  SITE (59): Xaa equals any of the naturally occurring L-amino acids
AISVLASPLTSLLSCGDRMDRFLVKGAQGGLLRKQEEQEPTGEEPAVLGGDKESTRKRXRREAPGNGGHSAGPSWRHIRAEGLDCSYTVLFGKAEADEIFQELEKEVEYFTGIKMAVTTSGSTEMMKENWPLGAPLPLSPSVPAETLSSGIRIPVGKAPPGGWRWSGCRWPTGAY

SEQ ID NO: 1334 - protein, 63 aa, Homo sapiens
SSFLLVQFDGVNGEFQAQLLNFVASSSSPSHLQSSAPLCLGDRQEVGEELNLFIFPGRDIFKA

SEQ ID NO: 1335 - protein, 95 aa, Homo sapiens
  SITE (50): Xaa equals any of the naturally occurring L-amino acids
LLLFLIMFSAERHGLKEPKRVEELQNKIVNCLKDHVTFNNGGLNRPNYLXKLLGKLPELRTLCTQGLQRIFYLKLEDLVPPPAIIDKLFLDTLPF

SEQ ID NO: 1336 - protein, 84 aa, Homo sapiens
DRRRKWRGGGILELLRMGGVPSAEAKGGEQPSWSWRDGEGFQLICRSCPCGPQPSGLAVDVPLPTHLPACPPARIALADLPERT

SEQ ID NO: 1337 - protein, 146 aa, Homo sapiens
  SITE (75): Xaa equals any of the naturally occurring L-amino acids
AGLRKRGRSGSAAQAEGLCKQWLQRAWQERRLLLREPRYTLLVAACLCLAEVGITFWVIHRVAYTEIDWKAYMAXVEGVINGTYDYTQLQGDTGPLVYPAGFVYIFMGLYYATSRGTDIRMAQNIFAVLYLATLLLVFLIYHQTCK

SEQ ID NO: 1338 - protein, 187 aa, Homo sapiens
  SITE (177): Xaa equals any of the naturally occurring L-amino acids
  SITE (185): Xaa equals any of the naturally occurring L-amino acids
  SITE (187): Xaa equals any of the naturally occurring L-amino acids
LTLLFPEPPAQAGMFVLVEMVDTVRIPPWQFERKLNDSIAEELNKKLANKVVYNVGLCICLFDITKLEDAYVFPGDGASHTKVHFRCVVFHPFLDEILIGKIKGCSPEGVHVSLGFFDDILIPPESLQQPAKFDEAEQVWVWEYETEEGAHDLYMDTGEEIRFRVVDESFVDTSPTXPSSADATXFX

SEQ ID NO: 1339 - protein, 43 aa, Homo sapiens
  SITE (29): Xaa equals any of the naturally occurring L-amino acids
GQTFTSGNLLSHVFHFYAHRIIWCNGAYXPKFQNFKFMYLFLH

SEQ ID NO: 1340 - protein, 104 aa, Homo sapiens
  SITE (1): Xaa equals any of the naturally occurring L-amino acids
  SITE (31): Xaa equals any of the naturally occurring L-amino acids
  SITE (100): Xaa equals any of the naturally occurring L-amino acids
XPAPQQPGPQRCEEPLHRDLPGGADQSGRRXSLRQTRTWKFIDPFCRIAARTKDSLVLNNITRGIFETIVEQAPLAIEDLLNELDTQDEEVASDSDESSXGGER

SEQ ID NO: 1341 - protein, 169 aa, Homo sapiens
  SITE (126): Xaa equals any of the naturally occurring L-amino acids
GSTPRGKMRAPIPEPKPGDLIEIFRPFYRHWAIYVGDGYVVHLAPPSEVAGAGAASVMSALTDKAIVKKELLYDVAGSDKYQVNNKHDDKYSPLPCSKIIQRAEELVGQEVLYKLTSENCEHFVNXLRYGVARSDQVRDVIIAASVAGMGLAAMSLIGVMFSRNKRQKQ

SEQ ID NO: 1342 - protein, 115 aa, Homo sapiens
  SITE (5): Xaa equals any of the naturally occurring L-amino acids
  SITE (6): Xaa equals any of the naturally occurring L-amino acids
  SITE (25): Xaa equals any of the naturally occurring L-amino acids
  SITE (49): Xaa equals any of the naturally occurring L-amino acids
  SITE (102): Xaa equals any of the naturally occurring L-amino acids
  SITE (114): Xaa equals any of the naturally occurring L-amino acids
FPNPXXRGVWARGPPGLSFKGKTLXGFGEIPPPPGGALCPKGKNFPGAXPERPQKRFPPGKESPVGIVKTKRGILKAGNSGCPPTSPNIPGGTWGLERCLGXLRQASQGWLVSXR

SEQ ID NO: 1343 - protein, 342 aa, Homo sapiens
  SITE (1): Xaa equals any of the naturally occurring L-amino acids
  SITE (24): Xaa equals any of the naturally occurring L-amino acids
XLHRGDDRSRTSGSPGLQEFGRGXAGVGGRPRRRRRKGAASRARLPFSLSIMDPSLLRERELFKKRALSTPVVEKRSASSESSSSSSKKKKTKVEHGGSSGSKQNSDHSNGSFNLKALSGSSGYKFGVLAKIVNYMKTRHQRGDTHPLTLDEILDETQHLDIGLKQKQWLMTEALVNNPKIEVIDGKYAFKPKYNVRDKKALLRLLDQHDQRGLGGILLEDIEEALPNSQKAVKALGDQILFVNRPDKKKILFFNDKSCQFSVDEEFQKLWRSVTVDSMDEEKIEEYLKRQGISSMQESGPKKVAPIQRRKKPASQKKRRFKTHNEHLAGVLKDYSDITSSK

SEQ ID NO: 1344 - protein, 310 aa, Homo sapiens
CGRRSSLHLLLGPPSLPSSHFPSSGVVPATLDAAAGTKEDPAAARRHLRLLLRPAPGPRRRHQGARLSLPGGLGPASSCRLRARTRLSHLGPCRQKNMAQETNQTPGPMLCSTGCGFYGNPRTNGMCSVCYKEHLQRQQNSGRMSPMGTASGSNSPTSDSASVQRADTSLNNCEGAAGSTSEKSRNVPVAALPVTQQMTEMSISREDKITTPKTEVSEPVVTQPSPSVSQPSTSQSEEKAPELPKPKKNRCFMCRKKVGLTGFDCRCGNLFCGLHRYSDKHNCPYDYKAEAAAKIRKENPVVVAEKIQRI

SEQ ID NO: 1345 - protein, 202 aa, Homo sapiens
  SITE (9): Xaa equals any of the naturally occurring L-amino acids
  SITE (182): Xaa equals any of the naturally occurring L-amino acids
RRARAHPGXRLWGRRRGPEPSTVGRKATKKTDKPRQEDKDDLDVTELTNEDLLDQLVKYGVNPGPIVGTTRKLYEKKLLKLREQGTESRSSTPLPTISSSAENTRQNGSNDSDRYSDNEEGKKKEHKKVKSTRDIVPFSELGNYSLWWWDFFRVFLFLKSPPVLLWAVPNYRQLRKYILLRXTYLGSLLLPQTCLAGDSCRS

SEQ ID NO: 1346 - protein, 223 aa, Homo sapiens
  SITE (35): Xaa equals any of the naturally occurring L-amino acids
  SITE (137): Xaa equals any of the naturally occurring L-amino acids
VIDHPRPRDTQFIVIIMNNQKVVAVLLQECKQVLXQLLLEAPDVSEEDKSEDQRCRALLPSELRTLIQEAKEMKWPFVPEKWQYKQAVGPEDKTNLKDVIGAGLQQLLASLRASILARDCAAAAAIVFLVDRFLYGXDVSGKLLQVAKGLHKLQPATPIAPQVVIRQARISVNSGKLLKAEYILSSLISNNGATGTWLYRNESDKVLVQSVCIQIRGQILQKL

SEQ ID NO: 1347 - protein, 744 aa, Homo sapiens
LDRTIKVWQLGSSSPNFTLEGHEKGVNCIDYYSGGDKPYLISGADDRLVKIWDYQNKTCVQTLEGHAQNVSCASFHPELPIIITGSEDGTVRIWHSSTYRLESTLNYGMERVWCVASLRGSNNVALGYDEGSIIVKLGREEPAMSMDANGKIIWAKHSEVQQANLKAMGDAEIKDGERLPLAVKDMGSCEIYPQTIQHNPNGRFVVVCGDGEYIIYTAMALRNKSFGSAQEFAWAHDSSEYAIRESNSIVKIFKNFKEKKSFKPDFGAESIYGGFLLGVRSVNGLAFYDWDNTELIRRIEIQPKHIFWSDSGELVCIATEESFFILKYLSEKVLAAQETHEGVTEDGIEDAFEVLGEIQEIVKTGLWVGDCFIYTSSVNRLNYYVGGEIVTIAHLDRTMYLLGYIPKDNRLYLGDKELNIISYSLLVSVLEYQTAVMRRDFSMADKVLPTIPKEQRTRVAHFLEKQGFKQQALTVSTDPEHRFELALQLGELKIAYQLAVEAESEQKWKQLAELAISKCQFGLAQECLHHAQDYGGLLLLATASGNANMVNKLAEGAERDGKNNVAFMSYFLQGKVDACLELLIRTGRLPEAAFLARTYLPSQVSRVVKLWRENLSKVNQKAAESLADPTEYENLFPGLKEAFVVEEWVKETHADLWPAKQYPLVTPNEERNVMEEGKDFQPSRSTAQQELDGKPASPTPVIVASHTANKEEKSLLELEVDLDNLELEDIDTTDINLDEDILDD

SEQ ID NO: 1348 - protein, 314 aa, Homo sapiens
  SITE (18): Xaa equals any of the naturally occurring L-amino acids
  SITE (87): Xaa equals any of the naturally occurring L-amino acids
NTVVMKVAEQTPLSALYXASLIKEAGFPPGVVNIITGYGPTAGAAIAQHMDVDKVAFTGSTEVGHLIQKAAGDSNLKRVTLELGGKXPSIVLADADMEHAVEQCHEALFFNMGQCCCAGSRTFVEESIYNEFLERTVEKAKQRKVGNPFELDTQQGPQVDKEQFERVLGYIQLGQKEGAKLLCGGERFGERGFFIKPTVFGGVQDDMRIAKEEIFGPVQPLFKFKKIEEVVERANNTRYGLAAAVFTRDLDKAMYFTQALQAGTVWVNTYNIVTCHTPFGGFKESGNGRELGEDGLKAYTEVKTVTIKVPQKNS

SEQ ID NO: 1349 - protein, 146 aa, Homo sapiens
RCPIASEVPWTITEAELRVTLTVEGKSIPCLIDTGATHSTLPSFQGPVSLAPITVVGIDGQASKPLKTPPLWCQLGQHSFMHSFLVIPTCPLPLLGRNILTKLSASLTIPGVQLHLIAALLPNPKPPLCPLTSPQYHPLPQDLPSA

SEQ ID NO: 1350 - protein, 296 aa, Homo sapiens
  SITE (53): Xaa equals any of the naturally occurring L-amino acids
PTRPRTRGAIFAARTRSERLRESETLSASIRRADPAGAAAAMDDREDLVYQAXLAEQAERYDEMVESMKKVAGMDVELTVEERNLLSVAYKNVIGARRASWRIISSIEQKEENKGGEDKLKMIREYRQMVETELKLICCDILDVLDKHLIPAANTGESKVFYYKMKGDYHRYLAEFATGNDRKEAAENSLVAYKAASDIAMTELPPTHPIRLGLALNFSVFYYEILNSPDRACRLAKAAFDDAIAELDTLSEESYKDSTLIMQLLRDNLTLWTSDMQGDGEEQNKEALQDVEDENQ

SEQ ID NO: 1351 - protein, 184 aa, Homo sapiens
  SITE (126): Xaa equals any of the naturally occurring L-amino acids
  SITE (131): Xaa equals any of the naturally occurring L-amino acids
  SITE (136): Xaa equals any of the naturally occurring L-amino acids
  SITE (137): Xaa equals any of the naturally occurring L-amino acids
  SITE (143): Xaa equals any of the naturally occurring L-amino acids
  SITE (146): Xaa equals any of the naturally occurring L-amino acids
  SITE (147): Xaa equals any of the naturally occurring L-amino acids
  SITE (149): Xaa equals any of the naturally occurring L-amino acids
  SITE (152): Xaa equals any of the naturally occurring L-amino acids
  SITE (159): Xaa equals any of the naturally occurring L-amino acids
  SITE (163): Xaa equals any of the naturally occurring L-amino acids
GSAPETSPEKCSSRAKSCKVIRKNIVKKCLELFSELAEDKENYKKFYEAFSKNLKLGIHEDSTNRRRLSELLRYHTSQSGDEMTSLSEYVSRMKETQKSIYYITGESKEQVANSAFVERVRKRGFXVVYMXEPIDXXCVQQLXEFXXKXLVXVTKEVWXCLRXRREEEDGREQGKFRPCSSEES

SEQ ID NO: 1352 - protein, 415 aa, Homo sapiens
WIPRAAGIRHELHLKEDQTEYLEERRVKEVVKKHSQFIGYPITLYLEKEREKEISDDEAEEEKGEKEEEDKDDEEKPKIEDVGSDEEDDSGKDKKKKTKKIKEKYIDQEELNKTKPIWTRNPDDITQEEYGEFYKSLTNDWEDHLAVKHFSVEGQLEFRALLFIPRRAPFDLFENKKKKNNIKLYVRRVFIMDSCDELIPEYLNFIRGVVDSEDLPLNISREMLQQSKILKVIRKNIVKKCLELFSELAEDKENYKKFYEAFSKNLKLGIHEDSTNRRRLSELLRYHTSQSGDEMTSLSEYVSRMKETQKSIYYITGESKEQVANSAFVERVRKRGFEVVYMTEPIDEYCVQQLKEFDGKSLVSVTKEGLELPEDEEEKKKMEESKAKFENLCKLMGYMMAKKHWRSTLTTPFLE

SEQ ID NO: 1353 - protein, 256 aa, Homo sapiens
  SITE (10): Xaa equals any of the naturally occurring L-amino acids
SPISDGNDAXLRHVNIDHLHVGWYQSTYYGSFVTRALLDSQFSYQHAIEESVVLIYDPIKTAQGSLSLKAYRLTPKLMEVCKEKDFSPEALKKANITFEYMFEEVPIVIKNSHLINVLMWELEKKSAVADKHELLSLASSNHLGKNLQLLMDRVDEMSQDIVKYNTYMRNTSKQQQQKHQYQQRRQQENMQRQSRGEPPLPEEDLSKLFKPPQPPARMDSLLIAGQINTYCQNIKEFTAQNLGKLFMAQALQEYNN

SEQ ID NO: 1354 - protein, 210 aa, Homo sapiens
  SITE (192): Xaa equals any of the naturally occurring L-amino acids
  SITE (208): Xaa equals any of the naturally occurring L-amino acids
IMKLLTRAGSFSRFYSLKVAPKVKATAAPAGAPPQPQDLEFTKLPNGLVIASLENYSPVSRIGLFIKAGSRYEDFSNLGTTHLLRLTSSLTTKGASSFKITRGIEAVGGKLSVTATRENMAYTVECLRGDVDILMEFLLNVTTAPEFRRWEVADLQPQLKIDKAVAFQNPQTHVIENLHAAAYRNALANPLXCPDYRIGKVTSEEVPXKL

SEQ ID NO: 1355 - protein, 316 aa, Homo sapiens
  SITE (309): Xaa equals any of the naturally occurring L-amino acids
SSASLPGAVAALSPLRIMATAEVLNIGKKLYEGKTKEVYELLDSPGKVLLQSKDQITAGNAARKNHLEGKAAISNKITSCIFQLLQEAGIKTAFTRKCGETAFIAPQCEMIPIEWVCRRIATGSFLKRNPGVKEGYKFYPPKVELFFKDDANNDPQWSEEQLIAAKFCFAGLLIGQTEVDIMSHATQAIFEILEKSWLPQNCTLVDMKIEFGVDVTTKEIVLADVIDNDSWRLWPSGDRSQQKDKQSYRDLKEVTPEGLQMVKKNFEWVAERVELLLKSESQCRVVVLMGSTSDLGHCEKIKKACGNFXHSMVNFE

SEQ ID NO: 1356 - protein, 368 aa, Homo sapiens
PGSACKAVSSLPQEKMAVAVRTLQEQLEKAKESLKNVDENIRKLTGRDPNDVRPIQARLLALSGPGGGRGRGSLLLRRGFSDSGGGPPAKQRDLEGAVSRLGGERRTRRESRQESDPEDDDVKKPALQSSVVATSKERTRRDLIQDQNMDEKGKQRNRRIFGLLMGTLQKFKQESTVATERQKRRQEIEQKLEVQAEEERKQVENERRELFEERRAKQTELRLLEQKVELAQLQEEWNEHNAKIIKYIRTKTKPHLFYIPGRMCPATQKLIEESQRKMNALFEGRRIEFAEQINKMEARPRRQSMKEKEHQVVRNEEQKAEQEEGKVAQREEELEETGNQHNDVEKKEKKGKEEKKERKKRKERKEKK

SEQ ID NO: 1357 - protein, 201 aa, Homo sapiens
ALIMSFIFEWIYNGFSSVLQFLGLYKKSGKLVFLGLDNAGKTTLLHMLKDDRLGQHVPTLHPTSEELTIAGMTFTTFDLGGHEQARRVWKNYLPAINGIVFLVDCADHSRLVESKVELNALMTDETISNVPILILGNKIDRTDAISEEKLREIFGLYGQTTGKGNVTLKELNARPMEVFMCSVLKRQGYGEGFRWLSQYID

SEQ ID NO: 1358 - protein, 224 aa, Homo sapiens
  SITE (71): Xaa equals any of the naturally occurring L-amino acids
  SITE (129): Xaa equals any of the naturally occurring L-amino acids
  SITE (169): Xaa equals any of the naturally occurring L-amino acids
  SITE (196): Xaa equals any of the naturally occurring L-amino acids
  SITE (221): Xaa equals any of the naturally occurring L-amino acids
VSQCAARYGPTGPRGRRRHGAVFDLDLETEEGSEGEGEPELSPADACPLAELRAAGLEPVGHYEEVFQVRXVQGTNLGKIYAMKVLRKAKIVRNAKDTAHTRAERNILESVKHPFIVELAYAFQTGGKXYLILECLSGGELFTHLGARGHLPGKIRPASTWLRSRWPWXISTPRASSTGDLKPEEHHGSAARAHIXTDRLLDFWQGVLFHGGRPSIDNFLXATI

SEQ ID NO: 1359 - protein, 336 aa, Homo sapiens
  SITE (225): Xaa equals any of the naturally occurring L-amino acids
  SITE (230): Xaa equals any of the naturally occurring L-amino acids
GGRPETEKGESGSFPARRTFEVEKRTPGTCAQHWDFLDSTMTLNNVTMRQGTVGMQPQQQRWSIPADGRHLMVQKEPHQYSHRNRHSATPEDHCRRSWSSDSTDSVISSESGNTYYRVVLIGEQGVGKSTLANIFAGVHDSMDSDCEVLGEDTYERTLMVDGESATIILLDMWENKGENEWLHDHCMQVGDAYLIVYSITDRASFEKASELRIQLRRARQTEDIXIILVXNKSDLVRCREVSVSEGRACAVVFDCKFIETSAAVQHNVKELFEGIVRQVRLRRSSKEKNERRLAYQKRKESMPRKARRFWGKIVAKNNKNMAFKLKSKSCHDLSVL

SEQ ID NO: 1360 - protein, 344 aa, Homo sapiens
  SITE (2): Xaa equals any of the naturally occurring L-amino acids
TXNLQRFGMNGQMLCNLGKERFLELAPDFVGDILWEHLEQMIKENQEKTEDQYEENSHLTSVPHWINSNTLGFGTEQAPYGMQTQNYPKGGLLDSMCPASTPSVLSSEQEFQMFPKSRLSSVSVTYCSVSQDFPGSNLNLLTNNSGTPKDHDSPENGADSFESSDSLLQSWNSQSSLLDVQRVPSFESFEDDCSQSLCLNKPTMSFKDYIQERSDPVEQGKPVIPAAVLAGFTGSGPIQLWQFLLELLSDKSCQSFISWTGDGWEFKLADPDEVARRWGKRKNKPKMNYEKLSRGLRYYYDKNIIHKTSGKRYVYRFVCDLQNLLGFTPEELHAILGVQPDTED

SEQ ID NO: 1361 - protein, 137 aa, Homo sapiens
ASAHTCTPPGHSTMPACRLGPLAAALLLSLLLFGFTLVSGTGAEKTGVCPELQADQNCTQECVSDSECADNLKCCSAGCATFCSLPNDKEGSCPQVNINFPQLGLCRDQCQVDSQCPGQMKCCRNGCGKVSCVTPNF

SEQ ID NO: 1362 - protein, 162 aa, Homo sapiens
TKLVMMQKLLKCSRLVLALALILVLESSVQGYPTQRARYQWVRCNPDSNSANCLEEKGPMFELLPGESNKIPRLRTDLFPKTRIQDLNRIFPLSEDYSGSGFGSGSGSGSGSGSGFLTEMEQDYQLVDESDAFHDNLRSLDRNLPSDSQDLGQHGLEEDFML

SEQ ID NO: 1363 - protein, 113 aa, Homo sapiens
  SITE (106): Xaa equals any of the naturally occurring L-amino acids
TPTPFGSARAPQARPGRRDGRMSGGRRKEEPPQPQLANGALKVSVWSKVLRSDAAWEDKDEFLDVIYWFRQIIAVVLGVILGSFAITRVLGNSRILPDQCKSPCTXTSAITTD

SEQ ID NO: 1364 - protein, 217 aa, Homo sapiens
  SITE (1): Xaa equals any of the naturally occurring L-amino acids
  SITE (33): Xaa equals any of the naturally occurring L-amino acids
XGGRSSSSTMSTGGDFGNPLRKFKLVFLGEQSXGKTSLITRFMYDSFDNTYQATIGIDFLSKTMYLEDRTVRLQLWDTAGQERFRSLIPSYIRDSTVAVVVYDITNVNSFQQTTKWIDDVRTERGSDVIIMLVGNKTDLADKRQVSIEEGERKAKELNVMFIETSAKAGYNVKQLFRRVAAALPGMESTQDRSREDMIDIKLEKPQEQPVSEGGCSC

SEQ ID NO: 1365 - protein, 103 aa, Homo sapiens
KSLDSVELSRSFTIYSSVCKLYLLYSQSIFTVLTIDSFPLLIFFFVNGSCDFRWGIFSSPKRIDSFSRFIIIDCQERTLQQGCTLNAVDGLSSRIYRLGLMPM

SEQ ID NO: 1366 - protein, 73 aa, Homo sapiens
  SITE (18): Xaa equals any of the naturally occurring L-amino acids
  SITE (46): Xaa equals any of the naturally occurring L-amino acids
  SITE (68): Xaa equals any of the naturally occurring L-amino acids
RHCMVSAVVPLFISPPDXFIPHLIFFLAAFNESFILETLYIFGFHXTILTLFCPVTFLKKTKTKNPFXLFKFW

SEQ ID NO: 1367 - protein, 238 aa, Homo sapiens
  SITE (199): Xaa equals any of the naturally occurring L-amino acids
  SITE (202): Xaa equals any of the naturally occurring L-amino acids
  SITE (211): Xaa equals any of the naturally occurring L-amino acids
  SITE (229): Xaa equals any of the naturally occurring L-amino acids
GIDPRVRLAPLGLQVSVEQRTPVSVPQMGFVKVVKNKAYFKRYQVKFRRRREGKTDYYARKRLVIQDKNKYNTPKYRMIVRVTNRDIICQIAYARIEGDMIVCAAYAHELPKYGVKVGLTNYAAAYCTGLLLARRLLNRFGMDKIYEGQVEVTGDEYNVESIDGQPGAFTCYLDAGLARTTTGNKVFGALKGAVDGGLXIPXSTKRFPGYXSESKEFNAEVHRKHIMGXEWLQITCAT

SEQ ID NO: 1368 - protein, 173 aa, Homo sapiens
  SITE (149): Xaa equals any of the naturally occurring L-amino acids
  SITE (150): Xaa equals any of the naturally occurring L-amino acids
GDSQGPASDWRVRDLRPVWGRWRPAQHLKITDSAGHILYSKEDATKGKFAFTTEDYDMFEVCFESKGTGRIPDQLVILDMKHGVEAKNYEEIAKVEKLKPLEVELRRLEDLSESIVNDFAYMKKREEEMRDTNESTNTRVLYFSIFSMXXLIGLATWQVFYLRRFFKAKKLIE

SEQ ID NO: 1369 - protein, 98 aa, Homo sapiens
LCYLDICGKAESFLTVKAEVSTGGNLLVVSPTTLPRVLSTKEVKRTEKEISISAARAGICLPDSLCFLFHRHPFRRELHQFIMRVREAKALRCVQGVT

SEQ ID NO: 1370 - protein, 168 aa, Homo sapiens
  SITE (127): Xaa equals any of the naturally occurring L-amino acids
PALGRFCGSKKPEPVLATGSRMFLRFYSDNSVQRKGFQASHATECGGQVRADVKTKDLYSHAQFGDNNYPGGVDCEWVIVAEEGYGVELVFQTFEVEEETDCGYDYMELFDGYDSTAPRLGRYCGSXPPEEVYSAGDSAVSHSIHHTKKGFHLRYTSTKFQDTLHSRK

SEQ ID NO: 1371 - protein, 141 aa, Homo sapiens
  SITE (131): Xaa equals any of the naturally occurring L-amino acids
  SITE (139): Xaa equals any of the naturally occurring L-amino acids
FDRGARLPDGLGLWSLRGPLRRLVLFYQGKLCSMAGNFWQSSHYLQWILDKQDLLKERQKDLKFLSEEEYWKLQIFFTNVIQALGEHLKLRQQVIATATVYFKRFYARYSLKSIDPVLMAPTCVFLASKVXGKKIFFFXGG

SEQ ID NO: 1372 - protein, 327 aa, Homo sapiens
KGVFGFRWGLAAPEPSMASSRASSTATKTKAPDDLVAPVVKKPHIYYGSLEEKERERLAKGESGILGKDGLKAGIEAGNINITSGEVFEIEEHISERQAEVLAEFERRKRARQINVSTDDSEVKACLRALGEPITLFGEGPAERRERLRNILSVVGTDALKKTKKDDEKSKKSKEEYQQTWYHEGPNSLKVARLWIANYSLPRAMKRLEEARLHKEIPETTRTSQMQELHKSLRSLNNFCSQIGDDRPISYCHFSPNSKMLATACWSGLCKLWSVPDCNLLHTLRGHNTNVGAIVFHPKSTVSLDPKDVNLASCAADGSVKLWSLDR

SEQ ID NO: 1373 - protein, 47 aa, Homo sapiens
  SITE (15): Xaa equals any of the naturally occurring L-amino acids
  SITE (22): Xaa equals any of the naturally occurring L-amino acids
GTHHQAQPNFVFFLXRWGFITXPRLISNLWAQAIHSPRPPKMLGLQA

SEQ ID NO: 1374 - protein, 114 aa, Homo sapiens
AATKVTLSLDTASVLSPCFTGHSISLQPSLCASAIFTHHGAEVRRGSLGIWRPVKDQAWRAQGPTWASSRGAPKGQEHPKRREGSQPPLTASLQPSPTLITISLQAFCLRDVAP

SEQ ID NO: 1375 - protein, 100 aa, Homo sapiens
  SITE (92): Xaa equals any of the naturally occurring L-amino acids
  SITE (93): Xaa equals any of the naturally occurring L-amino acids
EAVNEQLSSERSNLAQVIRQEFEDRLAASEEETRQAKAELATLQARQQLELEEVHRRVKTALARKEEAVSSLRTQHEVSPCGQPCWTSGLGXXLTLWVCC

SEQ ID NO: 1376 - protein, 45 aa, Homo sapiens [sequence omitted]

SEQ ID NO: 1377 - protein, 230 aa, Homo sapiens
  SITE (26): Xaa equals any of the naturally occurring L-amino acids
  SITE (162): Xaa equals any of the naturally occurring L-amino acids
SPSGAPGRPGLRRRRRRRRRRADHVXAKENPCRKFQANIFNKSKCQNCFKPRESHLLNDEDLTQAKPIYGGWLLLAPDGTDFDNPVHRSRKWQRRFFILYEHGLLRYALDEMPTTLPQGTINMNQCTDVVDGEGRTGQKFSLCILTPEKEHFIRAETKEIVXGWLEMLMVYPRTNKQNQKKKRKVEPPTPQEPGPAKWLLPAAAAAAAAAAASPVLRKSPPPSPHSGRKK

SEQ ID NO: 1378 - protein, 75 aa, Homo sapiens
GKQKPLSSAFHLQERRKNSCLLSVIQFACILCSCTNPYRVNLLSTIYWCLIENDCLPSFLVPFLTVLKYLKCIDC

SEQ ID NO: 1379 - protein, 239 aa, Homo sapiens
  SITE (229): Xaa equals any of the naturally occurring L-amino acids
  SITE (231): Xaa equals any of the naturally occurring L-amino acids
  SITE (234): Xaa equals any of the naturally occurring L-amino acids
RRGQVGARSCCFWFSCGRRRCPAALGCRTDKAWATAPQKPTQLDAGAGRRVGDRVSEGAARAGGRAPEGERGGGGGSAAGRAGRGMSMPDAMPLPGVGEELKQAKEIEDAEKYSFMATVTKAPKKQIQFADDMQEFTKFPTKTGRRSLSRSISQSSTDSYSSAASYTDSSDDEVSPREKQQTNSKGSSNFCVKNIKQAEFGRREIEIAEQDMSALISLRKRAQGEKPLXGXKIXGLTHY

SEQ ID NO: 1380 - protein, 97 aa, Homo sapiens
SCADIVSCVSAVAVEELKLGKMVCIPCIVIPVLLWIYKKFLEPYIYPLVSPFVSRIWPKKAIQESNDTNKGKVNFKGADMNGLPTKGPTEICDKKKD

SEQ ID NO: 1381 - protein, 618 aa, Homo sapiens
  SITE (507): Xaa equals any of the naturally occurring L-amino acids
  SITE (524): Xaa equals any of the naturally occurring L-amino acids
  SITE (562): Xaa equals any of the naturally occurring L-amino acids
PRVRPRVRSITMSVRYSSSKHYSSSRSGGGGGGGGCGGGGGVSSLRISSSKGSLGGGFSSGGFSGGSFSRGSSGGGCFGGSSGGYGGLGGFGGGSFRGSYGSSSFGGSYGGSFGGGSFGGGSFGGGSFGGGGFGGGGFGGGFGGGFGGDGGLLSGNEKVTMQNLNDRLASYLDKVRALEESNYELEGKIKEWYEKHGNSHQGEPRDYSKYYKTIDDLKNQILNLTTDNANILLQIDNARLAADDFRLKYENEVALRQSVEADINGLRRVLDELTLTKADLEMQIESLTEELAYLKKNHEEEMKDLRNVSTGDVNVEMNAAPGVDLTQLLNNMRSQYEQLAEQNRKDAEAWFNEKSKELTTEIDNNIEQISSYKSEITELRRNVQALEIELQSQLALKQSLEASLAETEGRYCVQLSQIQAQISALEEQLQQIRAETECQNTEYQQLLDIKIRLENEIQTYRSLLEGEGSSGGGGRGGGSFGGGYGGGSSGGGSSGGGHGGSSGGGYXGGSSGGGSSGGGYGGGXPAAATAAVPAAATVVAVPAAAAAATGAALRRRHSSGGXYGGGTAPAADTAAAQLRRRIRRRHSSGGHKSSSSGSVGESSSKGPRSAETSWGNQN

SEQ ID NO: 1382 - protein, 500 aa, Homo sapiens
QAWSLQVALSPFFFPASPSNSFAAAVPQLLFPELPLPHVPGQESAKRRSARRFLIMSELTKELMELVWGTKSSPGLSDTIFCRWTQGFVFSESEGSALEQFEGGPCAVIAPVQAFLLKKLLFSSEKSSWRDCSEEEQKELLCHTLCDILESACCDHSGSYCLVSWLRGKTTEETASISGSPAESSCQVEHSSALAVEELGFERFHALIQKRSFRSLPELKDAVLDQYSMWGNKFGVLLFLYSVLLTKGIENIKNEIEDASEPLIDPVYGHGSQSLINLLLTGHAVSNVWDGDRECSGMKLLGIHEQAAVGFLTLMEALRYCKVGSYLKSPKFPIWIVGSETHLTVFFAKDMALVAPEAPSEQARRVFQTYDPEDNGFIPDSLLEDVMKALDLVSDPEYINLMKNKLDPEGLGIILLGPFLQEFFPDQGSSGPESFTVYHYNGLKQSNYNEKVMYVEGTAVVMGFEDPMLQTDDTPIKRCLQTKWPYIELLWTTDRSPSLN

SEQ ID NO: 1383 - protein, 175 aa, Homo sapiens
  SITE (80): Xaa equals any of the naturally occurring L-amino acids
  SITE (133): Xaa equals any of the naturally occurring L-amino acids
LCDSEEVAWELGEAQRMPPGESPHHQCITSNVPLERPPLCSVMFQKLLMKQHVLVACALACHDSPLTGPPVKSKGLPAAXSEASAESSHPHGSGEVITLSRRSDHTSSSPRGLLILGDDSSSEHLLQDWIPPXCRSWGLRALEQPMLESCLPPSATVPYPGTVEWPHGGDGRPAE

SEQ ID NO: 1384 - protein, 57 aa, Homo sapiens
SQSPCKQDKSKGGLACPSLFHTFLPGTESHGEFKTPSHILLLKLVQCTTSSEEYRMA

SEQ ID NO: 1385 - protein, 56 aa, Homo sapiens
  SITE (55): Xaa equals any of the naturally occurring L-amino acids
VPGSQPLETGALREDSLPPRILLHPWFESVLEPGYIDSEIGTSDQIVPEYQEDSXH

SEQ ID NO: 1386 - protein, 105 aa, Homo sapiens
  SITE (40): Xaa equals any of the naturally occurring L-amino acids
HELASSEFSHEAVKTHIDTVINALKTERDVSVRQRAADLXYAMCDRSNAKQIVSEMLRYLETADYAIREEIVLKVAILAEKYAVDYSWYVDTILNLIRIAGRLRE

SEQ ID NO: 1387 - protein, 67 aa, Homo sapiens
  SITE (1): Xaa equals any of the naturally occurring L-amino acids
  SITE (7): Xaa equals any of the naturally occurring L-amino acids
  SITE (9): Xaa equals any of the naturally occurring L-amino acids
XHRGNGXLXVPSEFPGRPTRPGKLDIVMHKMQEKVQSINYNPFDQKLYVYNDGYLLNYDLSVLQKPQ

SEQ ID NO: 1388 - protein, 345 aa, Homo sapiens
  SITE (297): Xaa equals any of the naturally occurring L-amino acids
VWMTSTSSPVPRAHCSNLTCNNSKNKTLVTQNSGVEALIHAILRAGDKDDITEPAVCALRHLTSRHPEAEMAQNSVRLNYGIPAIVKLLNQPNQWPLVKATIGLIRNLALCPANHAPLQEAAVIPRLVQLLVKAHQDAQRHVAAGTQQPYTDGVRMEEIVEGCTGALHILARDPMNRMEIFRLNTIPLFVQLLYSSVENIQRVAAGVLCELAQDKEAADAIDAEGASAPLMELLHSRNEGTATYAAAVLFRISEDKNPDYRKRVSVELTNSLFKHDPAAWEAAQSMIPINEPYGDDXDATYRPMYSSDVPLDPLEMHMDMDGDYPIDTYSDGLRPPYPTADHMLA

SEQ ID NO: 1389 - protein, 64 aa, Homo sapiens
  SITE (17): Xaa equals any of the naturally occurring L-amino acids
SLICYVQSLKATTHFFXKVDAFSAVLESVFCFWQESCKLCILKQMQKVVLCKTFVFCLSQINIL

SEQ ID NO: 1390 - protein, 371 aa, Homo sapiens
PPRALGSVAMENQVLTPHVYWAQRHRELYLRVELSDVQNPAISITENVLHFKAQGHGAKGDNVYEFHLEFLDLVKPEPVYKLTQRQVNITVQKKVSQWWERLTKQEKRPLFLAPDFDRWLDESDAEMELRAKEEERLNKLRLESEGSPETLTNLRKGYLFMYNLVQFLGFSWIFVNLTVRFCILGKESFYDTFHTVADMMYFCQMLAVVETINAAIGVTTSPVLPSLIQLLGRNFILFIIFGTMEEMQNKAVVFFVFYLWSAIEIFRYSFYMLTCIDMDWKVLTWLRYTLWIPLYPLGCLAEAVSVIQSIPIFNETGRFSFTLPYPVKIKVRFSFFLQIYLIMIFLGLYINFRHLYKQRRRRYGQKKKKIH

SEQ ID NO: 1391 - protein, 365 aa, Homo sapiens
  SITE (28): Xaa equals any of the naturally occurring L-amino acids
AEVNTVKYLKPSTSQIMKKLLLKFSSQXKKKKIKREIKILENLRGGPNIITLADIVKDPVSRTPALVFEHVNNTDFKQLYQTLTDYDIRFYMYEILKALDYCHSMGIMHRDVKPHNVMIDHEHRKLRLIDWGLAEFYHPGQEYNVRVASRYFKGPELLVDYQMYDYSLDMWSLGCMLASMIFRKEPFFHGHDNYDQLVRIAKVLGTEDLYDYIDKYNIELDPRFNDILGRHSRKRWERFVHSENQHLVSPEALDFLDKLLRYDHQSRLTAREAMEHPYFYTVVKDQARMGSSSMPGGSTPVSSANMMSGISSVPTPSPLGPLAGSPVIAAANPLGMPVQLPLALSSNGPICLLMPEQRWGSPPSP

SEQ ID NO: 1392 - protein, 276 aa, Homo sapiens
TMAASDTERDGLAPEKTSPDRDKKKEQSEVSVSPRASKHHYSRSRSRSRERKRKSDNEGRKHRSRSRSKEGRRHESKDKSSKKHKSEEHNDKEHSSDKGRERLNSSENGEDRHKRKERKSSRGRSHSRSRSRERRHRSRSRERKKSRSRSRERKKSRSRSRERKKSRSRSRERKRRIRSRSRSRSRHRHRTRSRSRTRSRSRDRKKRIEKPRRFSRSLSRTPSPPPFRGRNTAMDAQEALARRERPGVSLIVCPGWVTQCNLMLLPLGTQPDRKLQ

SEQ ID NO: 1393 - protein, 180 aa, Homo sapiens
  SITE (4): Xaa equals any of the naturally occurring L-amino acids
  SITE (139): Xaa equals any of the naturally occurring L-amino acids
  SITE (172): Xaa equals any of the naturally occurring L-amino acids
  SITE (180): Xaa equals any of the naturally occurring L-amino acids
ARRXVVITSKSGEILYRISPWAKYVVREGDNVNYDWIHWDPEHSYEFKHSRPKKPRSLRIYESHVGISSHEGKVASYKHFTCNVLPRIKGLGYNCIQLMAIMEHAYYASFGYQITSFFAASSRYGTPEELQELVDTAHXMGIIVLLDVVQAHASKNSSRWDWNMVWMGDRFXVNFPFLGX

SEQ ID NO: 1394 - protein, 162 aa, Homo sapiens
  SITE (64): Xaa equals any of the naturally occurring L-amino acids
ILTYKETGPQTGNSLVQASARRKDTMTAPCWAQPGSLAKCLLEAVPARGLQQGDSLPSGHYQYXLYLEVGKRSPLRQQDNGQFREGEGSKRFRGHRSQRTPPRPTAGSAWKIHLLGTFWQPDGSNSPLGLIPSSKSWLQMSLSSPYWRAPPDSWAQFISSPF

SEQ ID NO: 1395 - protein, 416 aa, Homo sapiens
  SITE (412): Xaa equals any of the naturally occurring L-amino acids
  SITE (413): Xaa equals any of the naturally occurring L-amino acids
QLDGVGLESRSPGCSTWEKADRVRGPVAQRAVASGSGKWRQEPSLHFAMSFLIDSSIMITSQILFFGFGWLFFMRQLFKDYEIRQYVVQVIFSVTFAFSCTMFELIIFEILGVLNSSSRYFHWKMNLCVILLILVFMVPFYIGYFIVSNIRLLHKQRLLFSCLLWLTFMYFFWKLGDPFPILSPKHGILSIEQLISRVGVIGVTLMALLSGFGAVNCPYTYMSYFLRNVTDTDILALERRLLQTMDMIISKKKRMAMARRTMFQKGEVHNKPSGFWGMIKSVTTSASGSENLTLIQQEVDALEELSRQLFLETADLYATKERIEYSKTFKGKYFNFLGYFFSIYCVWKIFMATINIVFDRVGKTDPVTRGIEITVNYLGIQFDVKFWSQHISFILVGIIIVTSIRGLLITLXXVIL

SEQ ID NO: 1396 - protein, 71 aa, Homo sapiens
IIYVHIVQQKYNVNHNIIFNFLVAILKKKQAKLILITVYVTQYIKNIISTCNQYKRLLMKHLIFFFFHTKS

SEQ ID NO: 1397 - protein, 204 aa, Homo sapiens
APRLVVTCRHVSPREAARVLVRSTTPKSVAIWGRVVFATQETCPYDIAVVSLEEDLDDVPIPVPAEHFHEGEAVSVVGFGVFGQSCGPSVTSGILSAVVQVNGTPVMLQTTCAVHSGSSGGPLFSNHSGNLLGIITSNTRDNNTGATYPHLNFSIPITVLQPALQQYSQTQDLGGLRELDRAAEPVRVVWRLQRPLAEAPRSKL

SEQ ID NO: 1398 - protein, 69 aa, Homo sapiens
  SITE (19): Xaa equals any of the naturally occurring L-amino acids
VFIVFNSVTSRFFPKKFLXIKSRLFRKYLPVLHFNFTNQTTAIQPIKQQKQSKERDLDIGIKESFHFII

SEQ ID NO: 1399 - protein, 238 aa, Homo sapiens
  SITE (18): Xaa equals any of the naturally occurring L-amino acids
  SITE (57): Xaa equals any of the naturally occurring L-amino acids
EAEAAERGPLHAGKQPRXPGGGARWPCCSAFKEQQFVIAGVLVEDSNNHHLMLEASXWATIEGLVELLQPFKQVAEMLSASRYPTISMVKPLLHMLLNTTLNIKETDSKELSMAKEVIAKELSKTYQETPEIDMFLNVATFLDPRYKRLPFLSAFERQQVENRVVEEAKGCWTRSKTAATGRLRTRSSRCPRSLPSRSSCGHPRRRPPASSTTCWPRSSARQAAWRTRKSGMPRWWRS

SEQ ID NO: 1400 - protein, 83 aa, Homo sapiens
  SITE (83): Xaa equals any of the naturally occurring L-amino acids
FLKLCGLKWQVASTDFTRFKLIFKSNHWRNRYTFVCRIFTSYNSTRKVFSFPADAGTPTGTLQKDASPDCTDGRWKHGPVCGX

SEQ ID NO: 1401 - protein, 79 aa, Homo sapiens
GALCAVWARAGRPGPQDVRCPLRRAGACGETRATCERGPETFCTRELRGLSNPASVGNVSETQGEWPQPFVTCSPACPK

SEQ ID NO: 1402 - protein, 222 aa, Homo sapiens
PANGLLFGGLRSRELRVFARLSTFRKIRAGVWEVPHSTGQRPLDSRGNLQLWVRGHLALVFALYRSCGPRGASGEDVSGRGFPAFCLGQWGCSCLSFSPTPWTVLGCWCTWLAHGGQRAENATAWLLVPFDQETQEETPQSAERPPGSLAHSRSGRDGRVSSLSSGIRKGMVSTPHCGGFRQGSYCLLCLGFPIWKMGAGVLTYLRWNGEQGTCRSPSENVM

SEQ ID NO: 1403 - protein, 139 aa, Homo sapiens
  SITE (126): Xaa equals any of the naturally occurring L-amino acids
RATLEHPALVPLQPAEMVELMFPLLLLLLPFLLYMAAPQIRKMLSSGVCTSTVQLPGKVVVVTGANTGIGKETAKELAQRGARVYLACRDVEKGELVAKEIQTTTGNQQVLVRKLDLSDTKSIRAXAKGFLAEEKHLHV

SEQ ID NO: 1404 - protein, 285 aa, Homo sapiens
EEQHSMLGSGFKAERLRVNLRLVINRLKLLEKKKTELAQKARKEIADYLAAGKDERARIRVEHIIREDYLVEAMEILELYCDLLLARFGLIQSMKELDSGLAESVSTLIWAAPRLQSEVAELKIVADQLCAKYSKEYGKLCRTNQIGTVNDRLMHKLSVEAPPKILVERYLIEIAKNYNVPYEPDSVVMAEAPPGVETDLIDVGFTDDVKKGGPGRGGSGGFTAPVGGPDGTVPDAHAHAYAICKYAFLISTAKGTIRFQWTANGDLSGLSQYSSTSDTSNSPIV

SEQ ID NO: 1405 - protein, 196 aa, Homo sapiens
  SITE (113): Xaa equals any of the naturally occurring L-amino acids
RVTFNNLSISGELEAVQNMVSTVECALKHVSDWLDETNKGTKTEGETEVKKDEAGENYSKDQGGRTLCGVMRIGLVAKGLLIKDDMDLELVLMCKDKPTETLLNTVKDNLPIXIQKLTEEKYQVEQCVNEASIIIRNTKEPTLTLKVILTSPLIRDELEKKDGENVSMKDPPDLLDRQKCLNALASLRHAKWFQAR

SEQ ID NO: 1406 - protein, 329 aa, Homo sapiens
  SITE (312): Xaa equals any of the naturally occurring L-amino acids
PPRPLSARKLWPPLPPPPTRTPAEPPRPRGRNPASNNSNSLNVNNGVPGGAAAASSATVAAASATTAASSSLATPELGSSLKKKKRLSQSDEDVIRLIGQHLNGLGLNQTVDLLMQESGCRLEHPSATKFRNHVMEGDWDKAENDLNELKPLVHSPHAIVVRGALEISQTLLGIIVRMKFLLLQQKYLEYLEDGKVLEALQVLRCELTPLKYNTERIHVLSGYLMCSHAEDLRAKAEWEGKGTASRSKLLDKLQTYLPPSVMLPPRRLQTLLRQAVELQRDRCLYHNTKLDNNLDSVSLLIDHVCSKRQFPXLYAADTYGSIVMNFGSC

SEQ ID NO: 1407 - protein, 713 aa, Homo sapiens
  SITE (9): Xaa equals any of the naturally occurring L-amino acids
  SITE (10): Xaa equals any of the naturally occurring L-amino acids
  SITE (134): Xaa equals any of the naturally occurring L-amino acids
  SITE (280): Xaa equals any of the naturally occurring L-amino acids
  SITE (282): Xaa equals any of the naturally occurring L-amino acids
  SITE (322): Xaa equals any of the naturally occurring L-amino acids
SPGPQPHSXXRSPPPPPLRPPPMKRLPLLVVFSTLLNCSYTQNCTKTPCLPNAKCEIRNGIEACYCNMGFSGNGVTICEDDNECGNLTQSCGENANCTNTEGSYYCMCVPGFRSSSNQDRFITNDGTVCIENVXANCHLDNVCIAANINKTLTKIRSIKEPVALLQEVYRNSVTDLSPTDIITYIEILAESSSLLGYKNNTISAKDTLSNSTLTEFVKTVNNFVQRDTFVVWDKLSVNHRRTHLTKLMHTVEQATLRISQSFQKTTEFDTNSTDIALKVXFXDSYNMKHIHPHMNMDGDYINIFPKRKAAYDSNGNVAVAFXYYKSIGPLLSSSDNFLLKPQNYDNSEEEERVISSVISVSMSSNPPTLYELEKITFTLSHRKVTDRYRSLCAFWNYSPDTMNGSWSSEGCELTYSNETHTSCRCNHLTHFAILMSSGPSIGIKDYNILTRITQLGIIISLICLAICIFTFWFFSEIQSTRTTIHKNLCCSLFLAELVFLVGINTNTNKLFCSIIAGLLHYFFLAAFAWMCIEGIHLYLIVVGVIYNKGFLHKNFYIFGYLSPAVVVGFSAALGYRYYGTTKVCWLSTENNFIWSFIGPACLIILVNLLAFGVIIYKVFRHTAGLKPEVSCFENIRSCARGALALLFLLGTTWIFGVLHVVHASVVTAYLFTVSNAFQGMFIFLFLCVLSRKIQEEYYRLFKNVPCCFGCLSC

SEQ ID NO: 1408 - protein, 336 aa, Homo sapiens
QRGHQGCRRARNCRVQHPVCSRGRDSGLYHLPHPQPVPENTWLYQALREGTRVQSVEQIREVASGAARIRGETLGLIGFGRTGQAVAVRAKAFGFSVIFYDPYLQDGIERSLGVQRVYTLQDLLYQSDCVSLHCNLNEHNHHLINDFTIKQMRQGAFLVNAARGGLVDEKALAQALKEGRIRGAALDVHESEPFSFAQGPLKDAPNLICTPHTAWYSEQASLEMREAAATEIRRAITGRIPESLRNCVNKEFFVTSAPWSVIDQQAIHPELNGATYRYPPGIVGVAPGGLPAAMEGIIPGGIPVTHNLPTVAHPSQAPSPNQPTKHGDNREHPNEQ

SEQ ID NO: 1409 - protein, 76 aa, Homo sapiens
  SITE (73): Xaa equals any of the naturally occurring L-amino acids
  SITE (74): Xaa equals any of the naturally occurring L-amino acids
EAEEDTSERSEEKRSVNCWDLGDQVQGGEYKLSLFGFAILGLTKPCSISSILGNNLLRWAFIFCFPELEISIXXKL

SEQ ID NO: 1410 - protein, 236 aa, Homo sapiens
  SITE (157): Xaa equals any of the naturally occurring L-amino acids
  SITE (167): Xaa equals any of the naturally occurring L-amino acids
  SITE (181): Xaa equals any of the naturally occurring L-amino acids
  SITE (183): Xaa equals any of the naturally occurring L-amino acids
HAASTTCPEQMDCSPTDSSSASPGASTTSTPGASPAPRSRKPGAVIESFVNHAPGVFSGTFSGTLHPNCQDSSGRPRRDIGTILQILNDLLSATRHYQGMPPSLAQLRCHAQCSPASPAPDLAPRTTSCEKLTAAPSASLLQGQSQIRMCKPPGDRXSADRKPRHAXKVERLQLLLHEKRXSXKGPAGPRVSVPLVTQPQGGRSDSSSSGGGGTQAQASGLGLDFEELRMEARSQP

SEQ ID NO: 1411 - protein, 280 aa, Homo sapiens
NWQCCVKTMVYHHMTEEERFEVDQLQGLRNSVRMELQDLELQLEERLLGLEEQLRAVRMPSPFRSSALMGMCGSRSADNLSCPSPLNVMEPVTELMQEQSYLKSELGLGLGEMGFEIPPGESSESVFSQATSESSSVCSGPSHANRRTGVPSTASVGKSKTPLVARKKVFRASVALTPTAPSRTGSVQTPPDLESSEEVDAAEGAPEVVGPKSEVEEGHGKLPSMPAAEEMHKNVEQDELQQVIREIKESIVGEIRREIVSGLLAAVSSSKASNSKQDYH

SEQ ID NO: 1412 - protein, 96 aa, Homo sapiens
  SITE (31): Xaa equals any of the naturally occurring L-amino acids
  SITE (93): Xaa equals any of the naturally occurring L-amino acids
  SITE (96): Xaa equals any of the naturally occurring L-amino acids
PQHTTPPPTETGTSGLSSGVSGSTTAASSPXGLVEREGVVLVFGPLTADSQEVLRRAWHWAQRLQDYCATQPALFHVGFPVSLIDHEGFQVCXDSX

SEQ ID NO: 1413 - protein, 172 aa, Homo sapiens
FSVFVLYSLRNASGLTAADIAQTQGFQECAQFLLNLQNCHLNHFYNNGILNGGHQNVFPNHISVGTNRKRCLEDSEDFGVKKARTEAQSLDSAVPLTNGDTEDDADKMHVDREFAVVTGGSGQFPVSCNNNPMVEDTKQQESGSVGPKEIEIYTVSAMQTPCRCRNQYAYYF

SEQ ID NO: 1414 - protein, 264 aa, Homo sapiens
  SITE (21): Xaa equals any of the naturally occurring L-amino acids
  SITE (46): Xaa equals any of the naturally occurring L-amino acids
  SITE (85): Xaa equals any of the naturally occurring L-amino acids
  SITE (107): Xaa equals any of the naturally occurring L-amino acids
  SITE (173): Xaa equals any of the naturally occurring L-amino acids
LCAPRSPRPGTGDAAPPSEPXASASGTDLLGWLIKEEAAAMSAVGXATPYLHHPGDSHSGRVSFLGAQLPPEVAAMARLLGDLDXSTFRKLLKFVVSSLQGEDCREXLQRLGVSANLPEEQLGALLAGMHTLLQQALRLPPTSLKPDTFRDQLQELCIPQDLVGDLASVVFGXPAALLDSVAQQQGAWLPHVADFRWRVDVAISTSALARSLQPSVLMQLKLSDGSAYRFEVPTAKFQELRYSVALVLKEMADLEKRCERRLQD

SEQ ID NO: 1415 - protein, 579 aa, Homo sapiens
AADRGRGPGAHRPISGNMATEHVNGNGTEEPMDTTSAVIHSENFQTLLDAGLPQKVAEKLDEIYVAGLVAHSDLDERAIEALKEFNEDGALAVLQQFKDSDLSHVQNKSAFLCGVMKTYRQREKQGTKVADSSKGPDEAKIKALLERTGYTLDVTTGQRKYGGPPPDSVYSGQQPSVGTEIFVGKIPRDLFEDELVPLFEKAGPIWDLRLMMDPLTGLNRGYAFVTFCTKEAAQEAVKLYNNHEIRSGKHIGVCISVANNRLFVGSIPKSKTKEQILEEFSKVTEGLTDVILYHQPDDKKKNRGFCFLEYEDHKTAAQARRRLMSGKVKVWGNVGTVEWADPIEDPDPEVMAKVKVLFVRNLANTVTEEILEKAFSQFGKLERVKKLKDYAFIHFDERDGAVKAMEEMNGKDLEGENIEIVFAKPPDQKRKERKAQRQAAKNQMYDDYYYYGPPHMPPPTRGRGRGGRGGYGYPPDYYGYEDYYDYYGYDYHNYRGGYEDPYYGYEDFQVGARGRGGRGARGAAPSRGRGAAPPRGRAGYSQRGGPGSARGVRGARGGAQQQRGRGQGKGVEAGPDLLQ

SEQ ID NO: 1416 - protein, 230 aa, Homo sapiens
  SITE (196): Xaa equals any of the naturally occurring L-amino acids
  SITE (204): Xaa equals any of the naturally occurring L-amino acids
  SITE (230): Xaa equals any of the naturally occurring L-amino acids
STHASAHASEPGQGGWPEVPAEGASRPCAAVPGGQRGCPACPLAGERELTHLLLPASEGDTEPQVTPHHQRRCLCLSDKYSQACHPLGSKVRRCRKPGPRDRQLTRVDKSPEMWCIVLFSLLAWVYAEPTMYGEILSPNYPQAYPSEVEKSWDIEVPEGYGIHLYFTHLDIELSENCAYDSVQIISGDTEEGRLCXQRSSNNPXLQLWKSSKSHTTNSKGGNPLFFLKKX

SEQ ID NO: 1417 - protein, 106 aa, Homo sapiens
  SITE (17): Xaa equals any of the naturally occurring L-amino acids
  SITE (75): Xaa equals any of the naturally occurring L-amino acids
ALPVMTAAGTGWPEAGXLPEVMGDGLANQINNPEVEVDITKPDMTIRQQIMQLKIMTNRLRSLTTATTWTSRTPXTTAAARAAVMAVWMTSAAGRSAGRAPAPGRP

SEQ ID NO: 1418 - protein, 258 aa, Homo sapiens
GHLLLCAWGPGGPGPLGPSEENFDMEAFTEMMEAYVPGFAHIPRGTIGDMMQKLSGQLSDARNKENLQPQSSGVQGQVPISPEPLQRPEMLKEETRSSAAAAADTQDEATGAEEELLPGVDVLLEVFPTCSVEQAQWVLAKARGDLEEAVQMLVEGKEEGPAAWEGPNQDLPRRLRGPQKDELKSFILQKYMMVDSAEDQKIHRPMAPKEAPKKLIRYIDNQVVSTKGERFKDVRNPEAEEMKATYINLKPARKYRFH

SEQ ID NO: 1419 - protein, 280 aa, Homo sapiens
LVEPAMAEPASVAAESLAGSRARAARTVLGQVVLPGEELLLPEQEDAEGPGGAVERPLSLNARACSRVRVVCGPGLRRCGDRLLVTKCGRLRHKEPGSGSGGGVYWVDSQQKRYVPVKGDHVIGIVTAKSGDIFKVDVGGSEPASLSYLSFEGATKRNRPNVQVGDLIYGQFVVANKDMEPEMVCIDSCGRANGMGVIGQDGLLFKVTLGLIRKLLAPDCEIIQEVGKLYPLEIVFGMNGRIWVKAKTIQQTLILANILEACEHMTSDQRKQIFSRLAES

SEQ ID NO: 1420 - protein, 147 aa, Homo sapiens
  SITE (10): Xaa equals any of the naturally occurring L-amino acids
  SITE (104): Xaa equals any of the naturally occurring L-amino acids
  SITE (105): Xaa equals any of the naturally occurring L-amino acids
FPGTGSDGGXPETVDSGRSEPPGAVVLPRLREVGRERTWRPGSMAGLELLSDQGYRVDGRRAGELRKIQARMGVFAQADGSAYIEQGNTKALAVVYGPHEASGXXGWGIVWPWELRGSRAERWLGDLRGKAARLIYTAMLSTASHSE

SEQ ID NO: 1421 - protein, 300 aa, Homo sapiens
GLPINCICERLNIIGEINTDTVYRQAINSKMFEVDMKIAAMHVKRKQLHQLLPNHVLQKKKKHSTEGVKLTALNDSSLDLSMDSDNSMSVPSPTSATKTSPLNSSGSSQGRNSPAPAVTAASVTNIQATEVSVPQVNSSESSGGTSSESIPQTATQPAISPPPKPTVSRVVSSTRLVNPPPRSSGNAATSGNAATKIPTPIVGVKRTSSPHKEESPKKTKTEEDETSEDANCLALSGHDKTEAKEQLDTETSTTQSETIQTAASLLASQKTSSTDLSDIPALPANPIPVIKNSIKLRLNR

SEQ ID NO: 1422 - protein, 315 aa, Homo sapiens
  SITE (125): Xaa equals any of the naturally occurring L-amino acids
  SITE (177): Xaa equals any of the naturally occurring L-amino acids
DSPLHLYQKNARLKNVEFLLVNRIHCGTRHQCLGYIKRRLAMCARRLGRTREAVKMMRDLMKEFPLLSMFNIHENLLEALLELQAYADVQAVLAKYDDISLPKSATICYTAALLKARAVSDKFSXEAASRRGLSTAEMNAVEAIHRAVEFNPHVPKYLLEMKSLILPPEHILKRGDXEAIAYAFFHLAHWKRVEGALNLLHCTWEGTFRMIPYPLEKGHLFYPYPICTETADRELLPSFHEVSVYPKKELPFFILFTAGLCSFTAMLALLTHQFPELMGVFAKAFLSTLFAPLNFVMEKVESILPSSLWHQLTRI

SEQ ID NO: 1423 - protein, 164 aa, Homo sapiens
SFPYLFLQSKNRWCFARELVKRYQEKWDKLLLTSTEKSHVDLFPKDSIIYLTADSPNVMTTFRHDKVYVIGSFVDKSMQPGTSLAKAKRLNLATECLPLDKYLQWEIGNKNLTLDQMIRILLCLKNNGNWQEALQFVPKRKHTGFLEISQHSQEFINRLKKAKT

SEQ ID NO: 1424 - protein, 81 aa, Homo sapiens
EVWLFMHPSSRALKLHGLIKVDAKQERNKQKKKTSKMFTKKLKQMSSACSISQSLLSSVVNMFQMTFSWKKNLYNIVECEG

SEQ ID NO: 1425 - protein, 172 aa, Homo sapiens [sequence omitted]

SEQ ID NO: 1426 - protein, 276 aa, Homo sapiens
  SITE (43): Xaa equals any of the naturally occurring L-amino acids
  SITE (273): Xaa equals any of the naturally occurring L-amino acids
  SITE (275): Xaa equals any of the naturally occurring L-amino acids
CKKQRLQQQQQQRRWQQQQQRRQQQQQRRHRWQQQHHQQQQQXKILIKSSPKLSVYPDPHLHSSQERERGKGGRKKKKPNNLAETSQRMLQNSAVLLVLVISASATHEAEQNDSVSPRKSRVAAQNSAEVVRCLNSALQVGCGAFACLENSTCDTDGMYDICKSFLYSAAKFDTQGKAFVKESLKCIANGVTSKVFLAIRRCSTFQRMIAEVQEECYSKLNVCSIAKRNPEAITEVVQLPNHFSNRYYNRLVRSLLECDEDTVSTIRDSLMEXIXA

SEQ ID NO: 1427 - protein, 166 aa, Homo sapiens
  SITE (36): Xaa equals any of the naturally occurring L-amino acids
  SITE (54): Xaa equals any of the naturally occurring L-amino acids
CNSRSQGLALTQVASRIPVGKRPATSGLELACVPPXPAPPTSRVQCWARAAQEXRTRRLARHQTHPTQRRGPQARPVVPSRWHCSSPLLQVQRPHRNTRACAPEPSFRPFLHVPTWDAECSGARTPSTAWTSAAVKLREACLSGPGSGSHQLLLLTPRSKRRTGGG

SEQ ID NO: 1428 - protein, 112 aa, Homo sapiens
  SITE (20): Xaa equals any of the naturally occurring L-amino acids
  SITE (57): Xaa equals any of the naturally occurring L-amino acids
QRGSTSETPRRRSSVWPACXQEGVKSGMYVVIEVKVATQEGKEITCRSYLMTNYESXPPSPQYKKIICMGAKENGLPLEYQEKLKAIEPNDYTGKVSEEIEDIIKKGETQTL

SEQ ID NO: 1429 - protein, 94 aa, Homo sapiens
  SITE (7): Xaa equals any of the naturally occurring L-amino acids
  SITE (80): Xaa equals any of the naturally occurring L-amino acids
PGTHVSXPHFLWGCASLRVANRMSSVQWWSQDSVCRADFLSLLKTLNTAVFSSQQRNKISLSDNDNNKQSIASTAFTAYXKTYYVPGTSTDFNL

SEQ ID NO: 1430 - protein, 95 aa, Homo sapiens
LSKQRPAVGVHHAFHLPHCFFASLLESPVSPRLAMDPNCSCAAGVSCTCAGSCKCKECKCTSCKKSCCSCCPVGCSKCAQGCVCKGASEKCSCCD

SEQ ID NO: 1431 - protein, 81 aa, Homo sapiens
  SITE (37): Xaa equals any of the naturally occurring L-amino acids
  SITE (38): Xaa equals any of the naturally occurring L-amino acids
PRHLITISYVVAVRNAFQVGTWDPESTFAPCGGRLPXXKMEAQSPYYQTVVVSRGRGEMFIGHSLSWGVIFITIHVNCTLV

SEQ ID NO: 1432 - protein, 201 aa, Homo sapiens
  SITE (114): Xaa equals any of the naturally occurring L-amino acids
  SITE (193): Xaa equals any of the naturally occurring L-amino acids
  SITE (201): Xaa equals any of the naturally occurring L-amino acids
THWSKDYQLVTWSRDQTLRMWRVDSQMQRLCANDILDGVDEFIESISLLPEPEKTLHTEDTDHQHTASHGEEEALKEDPPRNLLEERKSDQLGLPQTLQQEFSLINVQIRNVNXEMDAADRSCTVSVHCSNHRVKMLVKFPAQYPNNAAPSFQFINPTTITSTMKAKLLKILKDTALQKVKRGQSCLEPCLRXSSPALSPX

SEQ ID NO: 1433 - protein, 150 aa, Homo sapiens
TVVAWEGGYHTFSTCLTVSWLQEDQYDHLDAADMTKVEKSTNEAMEWMNNKLNLQNKQSLTMDPVVKSKEIEAKIKELTSTCSPIISKPKPKVEPPKEEQKNAEQNGPVDGQGDNPGPQAAEQGTDTAVLRIQTRSFLKWTLIDSNTCFY

SEQ ID NO: 1434 - protein, 145 aa, Homo sapiens [sequence omitted]

SEQ ID NO: 1435 - protein, 46 aa, Homo sapiens
  SITE (45): Xaa equals any of the naturally occurring L-amino acids
AGAQWHNHSSLQPWNSQAQVILPSAPARVAGTPGMHHYNQLIFFXF

SEQ ID NO: 1436 - protein, 95 aa, Homo sapiens
NSTMAYRGQGQKVQKVMVQPINLIFRYLQNRSRIQVWLYEQVNMRIEGCIIGFDEYMNLVLDDAEEIHSKTKSRKQLGRIMLKGDNITLLQSVSN

SEQ ID NO: 1437 - protein, 113 aa, Homo sapiens
  SITE (20): Xaa equals any of the naturally occurring L-amino acids
QGALGSPVPVAVAPLTPPSXCPAPPLRPPHTPLALTTCISPACVHPPGWLTHSHSHTQISGTNGPRVLRTPAQGLCRSLPHAFPSLTKPPAASFKLGAPALGLSCALFFFFFF

SEQ ID NO: 1438 - protein, 122 aa, Homo sapiens
  SITE (16): Xaa equals any of the naturally occurring L-amino acids
FLHTFNCSWSLTSPGXRDVLKGSQLWQVTDSWEMERTKEYSSCLTFLPTADIVQARVMEELNLLASQAAPIPTSQCTAPPHLFSPLSLTSPFIMSHKSGTVGSHYNLLCHRDSIFLISNHVS

SEQ ID NO: 1439 - protein, 323 aa, Homo sapiens
FVSPAIDSTRGDSSSLVAELQEKLQEEKAKFLEQLEEQEKRKNEEMQNVRTSLIAEQQTNFNTVLTREKMRKENIINDLSDKLKSTMQQQERDKDLIESLSEDRARLLEEKKKLEEEVSKLRSSSFVPSPYVATAPELYGACAPELPGESDRSAVETADEGRVDSAMETSMMSVQENIHMLSEEKQRIMLLERTLQLKEEENKRLNQRLMSQSMSSVSSRHSEKIAIRDFQVGDLVLIILDERHDNYVLFTVSPTLYFLHSESLPALDLKPGEGASGASRRPWVLGKVMEKEYCQAKKAQNRFKVPLGTKFYRVKAVSWNKKV

SEQ ID NO: 1440 - protein, 459 aa, Homo sapiens
TRWWGPVLWSKSRPPGRTRGPSGWRVGLTRTSRPASPSALRTGDGSSRPGTPPASPRVFEVRGGSGASARRSARSLPALESAIMDVLAEANGTFALNLLKTLGKDNSKNVFFSPMSMSCALAMVYMGAKGNTAAQMAQILSFNKSGGGGDIHQGFQSLLTEVNKTGTQYLLRMANRLFGEKSCDFLSSFRDSCQKFYQAEMEELDFISAVEKSRKHINTWVAEKTEGKIAELLSPGSVDPLTRLVLVNAVYFRGNWDEQFDKENTEERLFKVSKNEEKPVQMMFKQSTFKKTYIGEIFTQILVLPYVGKELNMIIMLPDETTDLRTVEKELTYEKFVEWTRLDMMDEEEVEVSLPRFKLEESYDMESVLRNLGMTDAFELGKADFSGMSQTDLSLSKVVHKSFVEVNEEGTEAAAATAAIMMMRCARFVPRFCADHPFLFFIQHSKTNGILFCGRFSSP

SEQ ID NO: 1441 - protein, 113 aa, Homo sapiens
LVEALKLQEQLKAPVKTLSEGIKRKLCFVLSILGNPSVVLLDELFTGMDPEGQQQMWQILQATIKNQERGALLTTHYMSEAKSLCDRVAIMVSGTLRCIGSIQQLKSLVKIIY

SEQ ID NO: 1442 - protein, 839 aa, Homo sapiens
  SITE (291): Xaa equals any of the naturally occurring L-amino acids
  SITE (295): Xaa equals any of the naturally occurring L-amino acids
  SITE (683): Xaa equals any of the naturally occurring L-amino acids
AEHWGAIPPAGGGAVGISETFLGKKVRTKTLSEDDLKEIPAEQMDFRANLQRQVKPKTVSEEERKVHSPQQVDFRSVLAKKGTSKTPVPEKVPPPKPATPDFRSVLGGKKKLPAENGSSSAETLNAKAVESSKPLSNAQPSGPLKPVGNAKPAETLKPMGNAKPAETLKPMGNAKPDENLKSASKEELKKDVKNDVNCKRGHAGTTDNEKRSESQGTAPAFKQKLQDVHVAEGKKLLLQCQVSSDPPATIIWTLNGKTLKTTKFIILSQEGSLCSVSIEKALPEDRGLYKXVAKXDAGQAECSCQVTVDDAPASENTKAPEMKSRRPKSSLPPVLGTESDATVKKKPAPKTPPKAAMPPQIIQFPEDQKVRAGESVELFGKVTGTQPITCTWMKFRKQIQESEHMKVENSENGSKLTILAARQEHCGCYTLLVENKLGSRQAQVNLTVVDKPDPPAGTPCASDIRSSSLTLSWYGSSYDGGSAVQSYSIEIWDSANKTWKELATCRSTSFNVQDLLPDHEYKFRVRAINVYGTSEPSQESELTTVGEKPEEPKDEVEVSDDDEKEPEVDYRTVTINTEQKVSDFYDIEERLGSGKFGQVFRLVEKKTRKVWAGKFFKAYSAKEKENIRQEISIMNCLHHPKLVQCVDAFEEKANIVMVLEIVSGGELFERIIDEDFELTEREXIKYMRQISEGVEYIHKQGIVHLDLKPENIMCVNKTGTRIKLIDFGLARRLENAGSLKVLFGTPEFVAPEVINYEPIGYATDMWSIGVICYILVSGLSPFMGDNDNETLANVTSATWDFDDEAFDEISDDAKDFISNLLKKDMKNRLDCTHAFSIHG

SEQ ID NO: 1443 - protein, 111 aa, Homo sapiens
CSCTVRARRRLNRGLRRKQHSLLKRLRKAKKEAPPMEKPEVVKTHLRDMIILPEMVGSMVGVYNGKTFNQVEIKPEMIGHYLGEFSITYKPVKHGRPGIGATHSSRFIPLK

SEQ ID NO: 1444 - protein, 531 aa, Homo sapiens
  SITE (6): Xaa equals any of the naturally occurring L-amino acids
  SITE (446): Xaa equals any of the naturally occurring L-amino acids
  SITE (474): Xaa equals any of the naturally occurring L-amino acids
  SITE (502): Xaa equals any of the naturally occurring L-amino acids
  SITE (504): Xaa equals any of the naturally occurring L-amino acids
EKSVQXSKRESVSHRSPSPEPIYNSEGKRLNTREFRTRKKLEEERHNLITEMVALNPDFKPPADYKPPATRVSDKVMIPQDEYPEINFVGLLIGPRGNTLKNIEKECNAKIMIRGKGSVKEGKVGRKDGQMLPGEDEPLHALVTANTMENVKKAVEQIRNILKQGIETPEDQNDLRKMQLRELARLNGTLREDDNRILRPWQSSETRSITNTTVCTKCGGAGHIASDCKFQRPGDPQSAQDKARMDKEYLSLMAELGEAPVPASVGSTSGPATTPLASAPRPAAPANNPPPPSLMSTTQSRPPWMNSGPSESRPYHGMHGGGPGGPGGGPHSFPHPLPSLTGGHGGHPMQHNPNGPPPPWMQPPPPPMNQGPHPPGHHGPPPMDQYLGSTPVGSGVYRLHQGKGMMPPPPMGMMPPPPPPPSGQPPPPPSGPLPPWQQQQQQPPPXPPPSSSMASSTPLPWQQNTTTTTTSAGXGSIPPWQQQQAAAAASPGAPQMQGNPTXGXMALLQWISTWEVRLWALGSIACIKEKV

SEQ ID NO: 1445 - protein, 99 aa, Homo sapiens
STCRVVEVGKQQGTLYNARQLQYGKNGPGPWDKIRVVLTPRGRGQPAFRVASSVPLQSDCVHLVQLMSESPALGYFILVRTLTSHIGSINSFGKELISF

SEQ ID NO: 1446 - protein, 65 aa, Homo sapiens
QPPQTFWQALQLCYFIQLILQIESNGHSVSFGRMDQYLYPYYRRDVELNQTLDREHAIEMCIAAG

SEQ ID NO: 1447 - protein, 189 aa, Homo sapiens
  SITE (116): Xaa equals any of the naturally occurring L-amino acids
YCSAAMAEPQPPSGGLTDEAALSCCSDADPSTKDFLLQQTMLRVKDPKKSLDFYTRVLGMTLIQKCDFPIMKFSLYFLAYEDKNDIPKEKDEKIAWALSRKATLELTHNWGTEDDXTQSYHNGNSDPRGFGHIGIAVPDVYSACKRFEELGVKFVKKPDDGKMKGLAFIQDPDGYWIEILNPNKMATLM

SEQ ID NO: 1448 - protein, 219 aa, Homo sapiens
FEERYTFEIPFLEAQRRTLLLTVVDFDKFSRHCVIGKVSVPLCEVDLVKGGHWWKALIPSSQNEVELGELLLSLNYLPSAGRLNVDVIRAKQLLQTDVSQGSDPFVKIQLVHGLKLVKTKKTSFLRGTIDPFYNESFSFKVPQEELENASLVFTVFGHNMKSSNDFIGRIVIGQYSSGPSETNHWRRMLNTHRTAVEQWHSLRSRAECDRVSPASLEVT

SEQ ID NO: 1449 - protein, 44 aa, Homo sapiens
DWVFKLAFVNLIALRLPSNEKKSQNFYLVFVHFLLKCNHMILVC

SEQ ID NO: 1450 - protein, 272 aa, Homo sapiens
  SITE (183): Xaa equals any of the naturally occurring L-amino acids
STPCWPLPPVWLGCGEMCLCVQVPERDSVSSVSSATSSSSSAHSVDSEDMYADLASPVSSASSRSPAPAQTRKEKGKSKKEDGVKEEKRKRDSSTQPPKSAKPPAGGKSSQQPSTPQQAPPGQPQQGTFVAHKEIKLTLLNKAADKGSRKRYEPSDKDRQSPPPAKRPNTSPDRGSRDRKSGXRLGSPKPERQRGQNSKAPAAPADRKRQLSPQSKSSSKVTSVPGKASDPGAASTKSGKASTLSRREELLKQLKAVEDAIARKRAKIPGKA

SEQ ID NO: 1451 - protein, 164 aa, Homo sapiens
  SITE (122): Xaa equals any of the naturally occurring L-amino acids
  SITE (144): Xaa equals any of the naturally occurring L-amino acids
  SITE (150): Xaa equals any of the naturally occurring L-amino acids
VMAACRYCCSCLRLRPLSDGPFLLPRRDRALTQLQVRALWSSAGSRAVAVDLGNRKLEISSGKLARFADGSAVVQSGDTAVMVTAVSKTKPSPSQFMPLVVDYRQKAAAAGRIPTNYLRREXGTSDKEILTSRIIDRSIRPLFXAGYFYXTQVLCNLLAVDGVN

SEQ ID NO: 1452 - protein, 206 aa, Homo sapiens
ADCVFVEDVAVVCEETALITRPGAPSRRKEVDMMKEALEKLQLNIVEMKDENATLDGGDVLFTGREFFVGLSKRTNQRGAEILADTFKDYAVSTVPVADGLHLKSFCSMAGPNLIAIGSSESAQKALKIMQQMSDHRYDKLTVPDDIAANCIYLNIPNKGHVLLHRTPEEYPESAKVYEKLKDHMLIPVSMSELEKVDGLLTCCQF

SEQ ID NO: 1453 - protein, 645 aa, Homo sapiens
  SITE (608): Xaa equals any of the naturally occurring L-amino acids
AHASGKKPPNRPGITFEIGARLEALDYLQKWYPSRIEKIDYEEGKMLVHFERWSHRYDEWIYWDSNRLRPLERPALRKEGLKDEEDFFDFKAGEEVLARWTDCRYYPAKIEAINKEGTFTVQFYDGVIRCLKRMHIKAMPEDAKGQDWIALVKAAAAAAAKNKTGSKPRTSANSNKDKDKDERKWFKVPSKKEETSTCIATPDVEKKEDLPTSSETFGLHVENVPKMVFPQPESTLSNKRKNNQGNSFQAKRARLNKITGLLASKAVGVDGAEKKEDYNETAPMLEQAISPKPQSQKKNEADISSSANTQKPALLSSTLSSGKARSKKCKHESGDSSGCIKPPKSPLSPELIQVEDLTLVSQLSSSVINKTSPPQPVNPPRPFKHSERRRRSQRLATLPMPDDSVEKVSSPSPATDGKVFSISSQNQQESSVPEVPDVAHLPLEKLGPCLPLDLSRGSEVTAPVASDSSYRNECPRAEKEDTQMLPNPSSKAIADGRGAPAAAGISKTEKKVKLEDKSSTAFGKRKEKDKERREKRDKDHYRPKQKKKKKKKKKSKQHDYSDYEDSSLEFLERCSSPLTRSSGSSLASRSMFTEKTTTYQYPRAILSXDLSGESMCNHVMVKTRLTIPKCVTENKTYSVKSMRFK

SEQ ID NO: 1454 - protein, 69 aa, Homo sapiens
  SITE (8): Xaa equals any of the naturally occurring L-amino acids
LVIYSWHXFFSFGFAWLFLQVLSRYHSANHCYRMVTSFVLTVQQQIWVRLNLSVNFFFWCFFGLMTVSL

SEQ ID NO: 1455 - protein, 230 aa, Homo sapiens
  SITE (150): Xaa equals any of the naturally occurring L-amino acids
  SITE (152): Xaa equals any of the naturally occurring L-amino acids
LAGPRRWRVSRPEAYRSRWRGRAGQGFGLRRREMAAGGRMEDGSLDITQSIEDDPLLDAQLLPHHSLQAHFRPRFHPLPTVIIVNLLWFIHLVFVVLAFLTGVLCSYPNPNEDKCPGNYTNPLKVQTVIILGKVILWILHLLLECYIQYXHXKIRNRGYNLIYRSTRHLKRLALMIQSSGNTVLLLILCMQHSFPEPGRLYLDLILAILALELICSLICLLIYTVKIPEI

SEQ ID NO: 1456 - protein, 71 aa, Homo sapiens
  SITE (10): Xaa equals any of the naturally occurring L-amino acids
FFFFFSIIFXQKGKKPFKSLRNLKIDLDLTAEGDLNIIMALAEKIKPGLHSFIFGRPFYTSVQERDVLMTF

SEQ ID NO: 1457 - protein, 51 aa, Homo sapiens
EYNSVNANMIATLFTSLLLRPPPNLMARQTPSDRQRAIQFLLGFLLGSEED

SEQ ID NO: 1458 - protein, 260 aa, Homo sapiens
  SITE (4): Xaa equals any of the naturally occurring L-amino acids
  SITE (84): Xaa equals any of the naturally occurring L-amino acids
PRLXGDFVIRPPGSGEKEPHPFSLCHHFGHPAGLVLGFALTSRKDANPSLTPARAATCLCRGDPSLMTLRCLEPSGNGGEGTRXQWGTAGSAEEPSPQAARLAKALRELGQTGWYWGSMTVNEAKEKLKEAPEGTFLIRDSSHSDYLLTISVKTSAGPTNLRIEYQDGKFRLDSIICVKSKLKQFDSVVHLIDYYVQMCKDKRTGPEAPRNGTVHLYLTKPLYTSAPSLQHLCRLTINKCTGAIWGLPLPTRLKDYLGRI

SEQ ID NO: 1459 - protein, 145 aa, Homo sapiens
  SITE (11): Xaa equals any of the naturally occurring L-amino acids
AERSTCSRSRXARAAAPLPGGKGSGIFDESTPVQTRQHLNPPGGKTSDIFGSPVTATSRLAHPNKPKDHVFLCEGEEPKSDLKAARSIPAGAEPGEKGSARKAGPAKEQEPMPTVDSHEPRLGPRPRSHNKVLNPPGGKSSISFY

SEQ ID NO: 1460 - protein, 113 aa, Homo sapiens
  SITE (15): Xaa equals any of the naturally occurring L-amino acids
  SITE (34): Xaa equals any of the naturally occurring L-amino acids
PSIYDILLLIILWLXSRMDVESCSQREDRLKRAXSAKSANACNNCKCSVATCRLNSAGPEFCIRGLGYSPDKGWRHRMLEFSGHSGKGPLCRAVTVSCPIGPFPPVKCKSQES

SEQ ID NO: 1461 - protein, 268 aa, Homo sapiens
TTFRAKPGCCCSGGEDRGTAMAESSESFTMASSPAQRRRGNDPLTSSPGRSSRRTDALTSSPGRDLPPFEDESEGLLGTEGPLEEEEDGEELIGDGMERDYRAIPELDAYEAEGLALDDEDVEELTASQREAAERAMRHVTGRLAGAWAACAVGSCMTAMRRTRSALPASAASGAATEDGEEDEEMIESIENLEDLKGHSVREWVSMAGPRLEIHHRFKNFLRTHVDSHGHNVFKERISDMCKENRESLVVNYEDTGSQGARAGLLPA

SEQ ID NO: 1462 - protein, 393 aa, Homo sapiens
  SITE (149): Xaa equals any of the naturally occurring L-amino acids
KIRKQININNPFVFKHISNLKSMDHFDDIGPSVVMASPGMMQSGLSRELFESWCTDKRNGVIIAGYCVEGTLAKHIMSEPEEITTMSGQKLPLKMSVDYISFSAHTDYQQTSEFIRALKPPHVILVHGEQNEMARLKAALIREYEDNDXVHIEVHNPRNTEAVTLNFRGEKLAKVMGFLADKKPEQGQRVSGILVKRNFNYHILSPCDLSNYTDLAMSTVKQTQAIPYTGPFNLLCYQLQKLTGDVEELEIQEKPALKVFKNITVIQEPGMVVLEWLANPSNDMYADTVTTVILEVQSNPKIRKGAVQKVSKKLEMHVYSKRLEIMLQDIFGEDCVSVKDDSILSVTVDGKTANLNLETRTVECEEGSEDDESLREMVELAAQRLYEALTPVH

SEQ ID NO: 1463 - protein, 163 aa, Homo sapiens
LLDFPALPKFVLAQSPKAGKPSTMTSMTQSLREVIKAMTKARNFERVLGKITLVSAAPGKVICEMKVEEEHTNAIGTLHGGLTATLVDNISTMALLCTERGAPGVSVDMNITYMSPAKLGEDIVITAHVLKQGKTLAFTSVDLTNKATGKLIAQGRHTKHLGN

SEQ ID NO: 1464 - protein, 94 aa, Homo sapiens
WCCFRTVFSYPFRLVFCMRHHCKKILSLQKYFITKEQKQKKLKLHWLKYSFQQLSFLSTLMATPPRVEVTVVCTQVVPIKTPSFEPNYVHFVID

SEQ ID NO: 1465 - protein, 183 aa, Homo sapiens
  SITE (7): Xaa equals any of the naturally occurring L-amino acids
  SITE (22): Xaa equals any of the naturally occurring L-amino acids
  SITE (25): Xaa equals any of the naturally occurring L-amino acids
QVEIHYXFDTLIEWWREKNGSXCSXLIIVLDSENSTPWVKEVRKINDQYIAVQGAELIKTVDIEEADPPQLGDFTKDWVEYNCNSSNNICWTEKGRTVKAVYGVSKRWSDYTLHLPTGSDVAKHWMLHFPRITYPLVHLANWLCGLNLFWICKTCFRCLKRLKMSWFLPTVLDTGQGFKLVKS

SEQ ID NO: 1466 - protein, 146 aa, Homo sapiens
RDGVWSVQVRGQGEVENGRCITKLENMGFRVGQGLIERFTKDTARFKDELDIMKFICKDFWTTVFKKQIDNLRTNHQGIYVLQDNKFRLLTQMSAGKQYLEHASKYLAFTCGLIRGGLSNLGIKSIVTAEVSSMPACKFQVMIQKL

SEQ ID NO: 1467 - protein, 277 aa, Homo sapiens
IRHSHTGQGSCWVATLASAMIPPADSLLKYDTPVLVSRNTEKRSPKARLLKVSPQQPGPSGSAPQPPKTKLPSTPCVPDPTKQAEEILNAILPPREWVEDTQLWIQQVSSTPSTRMDVVHLQEQLDLKLQQRQARETGICPVRRELYSQCFDELIREVTINCAERGLLLLRVRDEIRMTIAAYQTLYESSVAFGMRKALQAEQGKSDMERKIAELETEKRDLERQVNEQKAKCEATEKRESERRQVEEKKHNEEIQFLKRTNQQLKAQLEGIIAPKK

SEQ ID NO: 1468 - protein, 263 aa, Homo sapiens
  SITE (6): Xaa equals any of the naturally occurring L-amino acids
RPAAAXSGGTGSGRGSRPEPSRAEPSRSGRRRPARRAATMSVFGKLFGAGGGKAGKGGPTPQEAIQRLRDTEEMLSKKQEFLEKKIEQELTAAKKHGTKNKRAALQALKRKKRYEKQLAQIDGTLSTIEFQREALENANTNTEVLKNMGYAAKAMKAAHDNMDIDKVDELMQDIADQQELAEEISTAISKPVGFGEEFDEDELMAELEELEQEELDKNLLEISGPETVPLPNVPSIALPSKPAKKKEEEDDDMKELENWAGSM

SEQ ID NO: 1469 - protein, 192 aa, Homo sapiens
  SITE (101): Xaa equals any of the naturally occurring L-amino acids
  SITE (118): Xaa equals any of the naturally occurring L-amino acids
FRPWTLDLVDEGHWPGPRVFGGRRGLAWVPTGCLTSSCSLHLGCVGQGLCCHSRNRFSSVGLPFLHPGLKWMPDANPSSGHVQPAGQPRGSLSSRAKDSRXPFSLLAFLLCPAVAAGXSSCSRRETVLPLSPSLPHPSSCPGNLEPLGAELDGGPAASMCTKRSPFQGKRTGWRMEGKPPRLRELQEGTLPG

SEQ ID NO: 1470 - protein, 260 aa, Homo sapiens
RKCLYLVAGKWEERKVVMAAIAASEVLVDSAEEGSLAAAAELAAQKREQRLRKFRELHLMRNEARKLNHQEVVEEDKRLKLPANWEAKKARLEWELKEEEKKKECAARGEDYEKVKLLEISAEDAERWERKKKRKNPDLGFSDYAAAQLRQYHRLTKQIKPDMETYERLREKHGEEFFPTSNSLLHGTHVPSTEEIDRMVIDLEKQIEKRDKYSRRRPYNDDADIDYINERNAKFNKKAERFYGKYTAEIKQNLERGTAV

SEQ ID NO: 1471 - protein, 121 aa, Homo sapiens
LVKGMTVLEAVLEIQAITGSRLLSMVPGPARPPGSCWDPTQCTRTWLLSHTPRRRWISGLPRASCRLGEEPPPLPYCDQAYGEELSIRHRETWAWLSRTDTAWPGAPGVKQARILGELLLV

SEQ ID NO: 1472 - protein, 298 aa, Homo sapiens
  SITE (26): Xaa equals any of the naturally occurring L-amino acids
  SITE (79): Xaa equals any of the naturally occurring L-amino acids
  SITE (89): Xaa equals any of the naturally occurring L-amino acids
PCAWRAARGGPCAAPLGLRERGRVSXRLLGPAAARALLLGLPGRTLEAASGRSWLAAARDRPAEPLFGRGEGGSQASGXAGAAAEAPGXQWGPASTPSLYENPWTIPNMLSMTRIGLAPVLGYLIIEEDFNIALGVFALAGLTDLLDGFIARNWANQRSALGSALDPLADKILISILYVSLTYADLIPVPLTYMIISRDVMLIAAVFYVRYRTLPTPRTLAKYFNPCYATARLKPTFISKVNTAVQLILVAASLAAPVFNYADSIYLQILWCFTAFTTAASAYSYYHYGRKTVQVIKD

SEQ ID NO: 1473 - protein, 526 aa, Homo sapiens
VALGAAMSAGEVERLVSELSGGTGGDEEEEWLYGDENEVERPEEENASANPPSGIEDETAENGVPKPKVTETEDDSDSDSDDDEDDVHVTIGDIKTGAPQYGSYGTAPVNLNIKTGGRVYGTTGTKVKGVDLDAPGSINGVPLLEVDLDSFEDKPWRKPGADLSDYFNYGFNEDTWKAYCEKQKRIRMGLEVIPVTSTTNKITVQQGRTGNSEKETALPSTKAEFTSPPSLFKTGLPPSRRLPGAIDVIGQTITISRVEGRRRANENSNIQVLSERSATEVDNNFSKPPPFFPPGAPPTHLPPPPFLPPPPTVSTAPPLIPPPGFPPPPGAPPPSLIPTIESGHSSGYDSRSARAFPYGNVAFPHLPGSAPSWPSLVDTSKQWDYYARREKDRDRERDRDRERDRDRDRERERTRERERERDHSPTPSVFNSDEERYRYREYAERGYERHRASREKEERHRERRHREKEETRHKSSRSNSRRRHESEEGDSHRRHKHKKSKRSKEGKEAGSEPAPEQESTEATPAE

SEQ ID NO: 1474 - protein, 70 aa, Homo sapiens
  SITE (7): Xaa equals any of the naturally occurring L-amino acids
IMVRPGXTLRLDKKMLLKRSSFKRSCSCVKKLQVWFVLVCDHECTMKKTLDAAFFSSEDSLGIPEDSSLR

SEQ ID NO: 1475 - protein, 345 aa, Homo sapiens
  SITE (44): Xaa equals any of the naturally occurring L-amino acids
  SITE (54): Xaa equals any of the naturally occurring L-amino acids
  SITE (129): Xaa equals any of the naturally occurring L-amino acids
  SITE (159): Xaa equals any of the naturally occurring L-amino acids
  SITE (166): Xaa equals any of the naturally occurring L-amino acids
KKVVSYFFRWQSLLIMIMMFKIPPSDGLLILPCYGSMTTDQQRXIFLPPPPGIXKCVISTNISATSLTIDGIRYVVDGGFVKQLNHNPRLGLDILEVVPISKSEALQRSGRAGRTSSGKCFRIYSKDFXNQCMPDHVIPEIKRTSLTSVVLTLKCLAIXDVIRFPXLDPPNERLILEALKQLYQCDAIDRSGHVTRLGLSMVEFPLPPHLTCAVIKAASLDCEDLLLPIAAMLSVENVFIRPVDPEYQKEAEQRHRELAAKAGGFNDFATLAVIFEQCKSSGAPASWCQKHWIHWRCLFSAFRVEAQLRELIRKLKQQSDSQKRPLKALNMKYYEDVFVRAISKM

SEQ ID NO: 1476 - protein, 195 aa, Homo sapiens
YLLFVKNMSSLEISSSCFSLETKLPLSPPLVEDSAFEPSRKDMDEVEEKSKDVINFTAEKLSVDEVSQLVISPLCGAISLFVGTTRNNFEGKKVISLEYEAYLPMAENEVRKICSDIRQKWPVKHIAVFHRLGLVPVSEASIIIAVSSAHRAASLEAVSYAIDTLKAKVPIWKKEIYEESSTWKGNKECFWASNS

SEQ ID NO: 1477 - protein, 387 aa, Homo sapiens
  SITE (35): Xaa equals any of the naturally occurring L-amino acids
  SITE (370): Xaa equals any of the naturally occurring L-amino acids
  SITE (374): Xaa equals any of the naturally occurring L-amino acids
  SITE (378): Xaa equals any of the naturally occurring L-amino acids
  SITE (379): Xaa equals any of the naturally occurring L-amino acids
DSEDNPQTLLFSATCPQWVYKVAKKYMKSRYEQVXLVGKMTQKAATTVEHLAIQCHWSQRPAVIGDVLQVYSGSEGRAIIFCETKKNVTEMAMNPHIKQNAQCLHGDIAQSQREITLKGFREGSFKVLVATNVAARGLDIPEVDLVIQSSPPQDVESYIHRSGRTGRAGRTGICICFYQPRERGQLRYVEQKAGITFKRVGVPSTMDLVKSKSMDAIRSLASVSYAAVDFFRPSAQRLIEEKGAVDALAAALAHISGASSFEPRSLITSDKGFVTMTLESLEEIQDVSCAWKELNRKLSSNAVSQITRMCLLKGNMGVCFDVPTTESERLQAEWHDSDWILSVPAKLPEIEEYYDGNTSSNSRQRSGWSXGRSXRSAXXGGRSGGGQ

SEQ ID NO: 1478 - protein, 55 aa, Homo sapiens
TGACHHAQLNFVFLVETGFHHVGQDGLNLLTLRSAHLSLPKCWDYRRNTRAWPVL

SEQ ID NO: 1479 - protein, 559 aa, Homo sapiens
  SITE (555): Xaa equals any of the naturally occurring L-amino acids
ARADGRDGRGGRRAPWRALTSASPRAALPQAQCPELGASPARGTLLAKEVVSPVLSSRPGGPKLPDDEEPPNMASESGKLWGGRFVGAVDPIMEKFNASIAYDRHLWEVDVQGSKAYSRGLEKAGLLTKAEMDQILHGLDKVAEEWAQGTFKLNSNDEDIHTANERRLKELIGATAGKLHTGRSRNDQVVTDLRLWMRQTCSTLSGLLWELIRTMVDRAEAERDVLFPGYTHLQRAQPIRWSHWILSHAVALTRDSERLLEVRKRINVLPLGSGAIAGNPLGVDRELLRAELNFGAITLNSMDATSERDFVAEFLFWASLCMTHLSRMAEDLILYCTKEFSFVQLSDAYSTGSSLMPQKKNPDSLELIRSKAGRVFGRCAGLLMTLKGLPSTYNKDLQEDKEAVFEVSDTMSAVLQVATGVISTLQIHQENMGQALSPDMLATDLAYYLVRKGMPFRQAHEASGKAVFMAETKGVALNQLSLQELQTISPLFSGDVICVWDYGHSVEQYGALGALRAPASTGRSARCGRYCRHSRPRSSHTCPLIKWAREEKKKXKKKF

SEQ ID NO: 1480 - protein, 200 aa, Homo sapiens
SLGELPTDPSSDEPVFHISHIDRVYTLRTDNINERTTWVQKIKAASEQYIDTEKKKREKAYQARSQKTSGIGRLMVHVIEATELKACKPNGKSNPYCEISMGSQSYTTRTIQDTLNPKWNFNCQFFIKDLYQDVLCLTLFDRDQFSPDDFLGRTEIPVAKIRTEQESKGPMTRRLLLHEVPTGEVWVRFDLQLFEQKTLL

SEQ ID NO: 1481 - protein, 109 aa, Homo sapiens
  SITE (36): Xaa equals any of the naturally occurring L-amino acids
QLLLLPPKAPRNPFLPCPGSRTPGYIWKVEMWGSCXLEYYVSPPSAVFSEHVCCPWWERGHCAVVHRCLSFTVGLSVCLSFLSAAQMENNYLLHWRERKSLRIPKGTLA

SEQ ID NO: 1482 - protein, 205 aa, Homo sapiens
DPRVRAARTAFGAVCRRLWQGLGNFSVNTSKGNTAKNGGLLLSTNMKWVQFSNLHVDVPKDLTKPVVTISDEPDILYKRLSVLVKGHDKAVLDSYEYFAVLAAKELGISIKVHEPPRKIERFTLLQSVHIYKKHRVQYEMRTLYRCLELEHLTGSTADVYLEYIQRNLPEGVAMEVTKTQLEQLPEHIKEPIWETLSEEKEESKS

SEQ ID NO: 1483 - protein, 370 aa, Homo sapiens
GQIKDETLQAAVREILALIGYVDPVKGRGIRILSIDGGGTRGVVALQTLRKLVELTQKPVHQLFDYICGVSTGAILAFMLGLFHMPLDECEELYRKLGSDVFSQNVIVGTVKMSWSHAFYDSQTWENILKDRMGSALMIETARNPTCPKVAAVSTIVNRGITPKAFVFRNYGHFPGINSHYLGGCQYKMWQAIRASSAAPGYFAEYALGNDLHQDGGLLLNNPSALAMHECKCLWPDVPLECIVSLGTGRYESDVRNTVTYTSLKTKLSNVINSATDTEEVHIMLDGLLPPDTYFRFNPVMCENIPLDESRNEKLDQLQLEGLKYIERNEQKMKKVAKILSQEKTTLQKINDWIKLKTDMYEGLPFFSKL

SEQ ID NO: 1484 - protein, 149 aa, Homo sapiens
DSTGPEFPGRPTRPNSVLTINATMPEPTKSAPAPKKGSKKAVTKAQKKDGKKRKRSRKESYSVYVYKVLKQVHPDTGISSKAMGIMNSFVNDIFERIAGEASRLAHYNKRSTITSREIQTAVRLLLPGELAKHAVSEGTKAVTKYTSSK

SEQ ID NO: 1485 - protein, 142 aa, Homo sapiens
DPRVRTFPPTLLLLLHSRLSLCLSHFLPSPHPPQCTEEGNRVQTHAAPVLRREGKPRREAAMNVDHEVNLLVEEIHRLGSKNADGKLSVKFGVLFRDDKCANLFEALVGTLKAAKRRKIVTYPGELLLQGVHDDVDIILLQD

SEQ ID NO: 1486 - protein, 298 aa, Homo sapiens
  SITE (52): Xaa equals any of the naturally occurring L-amino acids
  SITE (183): Xaa equals any of the naturally occurring L-amino acids
  SITE (195): Xaa equals any of the naturally occurring L-amino acids
  SITE (223): Xaa equals any of the naturally occurring L-amino acids
RGKCPSTSSLMKETAAPSQIMKNFQAPPQISLTITLLLGETTMMQPQPTQQXTPGPSSGGHASQSGDNSSEQGDGLDNSVASPGTVTDDDPDKDKKRQKKRGIFPKVATNIMRAWLFQHLTHPYPSEEQKKQLAQDTGLTILQVNNWFINARRRIVQPMIDQSNRAGFLLDPSVSQGAAYSPXGQPMGSFVLDGXQHMGIRPAGLQSMPGDYVSQGGPMGMSXAQPSYTPPQMTPHPTQLRHGPPMHSYLPSHPHHPAMMMHGGPPTHPGMTMSAQSPTMLNSVDPNVGGQVMDIHAQ

SEQ ID NO: 1487 - protein, 133 aa, Homo sapiens
HQAIKPGYSAENVAHTDHTLGCVTIVWCTCWKNSSMLLGDIISVGNMPLTDFFFFLFAVGLGQLIQQSIFFFFLSPNLNRSKMCSGIPGNRCVCKVKNRLFRNSLFRYLHPASHVKYLSLKGLRCTSFISYFS

SEQ ID NO: 1488 - protein, 42 aa, Homo sapiens
QRCPRCGHEGMAYHTRQMRSADEGQTVFYTCTNCKFQEKEDS

SEQ ID NO: 1489 - protein, 136 aa, Homo sapiens
  SITE (85): Xaa equals any of the naturally occurring L-amino acids
HEAAFVLCLTMPEPAKSAPAPKKGSKKAVTKAQKKDGKKRKRSRKESYSIYVYKVLKQVHPDTGISSKAMGIMNSFVNDIFERIXGEASRLAHYNKRSTITSREIQTAVRLLLPGELAKHAVSEGTKAVTKYTSSK

SEQ ID NO: 1490 - protein, 235 aa, Homo sapiens
PLSPGAQLGRGAPTSAFPPPAAEAHPAARRGLRSPQLPSGAMSQNGAPGMQEESLQGSWVELHFSNNGNGGSVPASVSIYNGDMEKILLDAQHESGRSSSKSSHCDSPPRSQTPQDTNRASETDTHSIGEKNSSQSEEDDIERRKEVESILKKNSDWIWDWSSRPENIPPKEFLFKHPKRTATLSMRNTSVMKKGGIFSAEFLKVFLPSLLLSHLLAIGLGIYIGRRLTTSTSTF

SEQ ID NO: 1491 - protein, 275 aa, Homo sapiens
  SITE (65): Xaa equals any of the naturally occurring L-amino acids
KPEKKGVHLNSDLPQMQHLWIPLCAPNSLSQLPITDTIRKDSKEKKKRKASKLTLWGTYHGMTLXSVTEGASARKTQTPAAQPVPRPVSQARPPPNQKKGSRTPIIIIPAATTSLITMLNAKDLLQDLKFVPSDEKKKQGCQRENETLIQRRKDQMQPGGTAISVTVPYRVVDQPLKLMPQDWDRVVAVFVQGPAWQFKGWPWLLPDGSPVDIFAKIKAFHLKYDEVRLDPNVQKWDVTVLELSYHKRHLDRPVFLRFWETLDRYMVKHKSHLRF

SEQ ID NO: 1492 - protein, 380 aa, Homo sapiens
GLRLGSWSGEEKGIPTCGTLGGPRGRRLPIDCGRCKGRSLWRLVGVLGSAGGGRGVSECERGTGIPNLRASRLWRRGGRAQAAMRDRTHELRQGDDSSDEEDKERVALVVHPGTARLGSPDEEFFHKVRTIRQTIVKLGNKVQELEKQQVTILATPLPEESMKQELQNLRDEIKQLGREIRLQLKAIEPQKEEADENYNSVNTRMRKTQHGVLSQQFVELINKCNSMQSEYREKNVERIRRQLKITNAGMVSDEELEQMLDSGQSEVFVSNILKDTQVTRQALNEISARHSEIQQLERSIRELHDIFTFLATEVEMQGEMINRIEKNILSSADYVERGQEHVKTALENQKKARKKKVLIAICVSITVVLLAVIIGVTVVG

SEQ ID NO: 1493 - protein, 88 aa, Homo sapiens
  SITE (10): Xaa equals any of the naturally occurring L-amino acids
  SITE (29): Xaa equals any of the naturally occurring L-amino acids
  SITE (73): Xaa equals any of the naturally occurring L-amino acids
AQKELTKAHXLEVRLHTFSMFGMPRLPPXDRRHWEIGEGGDSGLTIEKSWRELVPGHKEMSQELCHQQEALWXLLTTELILREKASRS

SEQ ID NO: 1494 - protein, 469 aa, Homo sapiens
  SITE (299): Xaa equals any of the naturally occurring L-amino acids
TSWMHTRFSRRNWGKRTGTVQVLKRSGRELIENSRDDTTWVKGQLQELSTRWDTVCKLSVSKQSRLEQALKQAEVFRDTVHMLLEWLSEAEQTLRFRGALPDDTEALQSLIDTHKEFMKKVEEKRVDVNSAVAMGEVILAVCHPDCITTIKHWITIIRARFEEVLTWAKQHQQRLETALSELVANAELLEELLAWIQWAETTLIQRDQEPIPQNIDRVKALIAEHQTFMEEMTRKQPDVDRVTKTYKRKNIEPTHAPFIEKSRSGGRKSLSQPTPPPMPILSQSEAKNPRINQLSARWXQVWLLALERQRKLNDALDRLEELKEFANFDFDVWRKKYMRWMNHKKSRVMDFFRRIDKDQDGKITRQEFIDGILASKFPTTKLEMTAVADIFDRDGDGYIDYYEFVAALHPNKDAYRPTTDADKIEDEVTRQVAQCKCAKRFQVEQIGENKYRVRKRKSSPLLWWFLICG

SEQ ID NO: 1495 - protein, 366 aa, Homo sapiens
TNYISRQAAEGGRVEGPPLRPPATSRRWAGPTLWRMEVTGDAGVPESGEIRTLKPCLLRRNYSREQHGVAASCLEDLRSKACDILAIDKSLTPVTLVLAEDGTIVDDDDYFLCLPSNTKFVALASNEKWAYNNSDGGTAWISQESFDVDETDSGAGLKWKNVARQLKEDLSSIILLSEEDLQMLVDAPCSDLAQELRQSCATVQRLQHTLQQVLDQREEVRQSKQLLQLYLQALEKEGSLLSKQEESKAAFGEEVDAVDTGISRETSSDVALASHILTALREKQAPELSLSSQDLELVTKEDPKALAVALNWDIKKTETVQEACERELALRLQQTQSLHSLRSISASKASPPGDLQNPKRARQDPT

SEQ ID NO: 1496 - protein, 578 aa, Homo sapiens
FPFELVTNPDFSPTPVTFEKALNAGFIQATDYVEIWQAYLDYLRRRVDFKQDSSKELEELRAAFTRALEYLKQEVEERFNESGDPSCVIMQNWARIEARLCNNMQKARELWDSIMTRGNAKYANMWLEYYNLERAHGDTQHCRKALHRAVQCTSDYPEHVCEVLLTMERTEGSLEDWDIAVQKTETRLARVNEQRMKAAEKEAALVQQEEEKAEQRKRARAEKKALKKKKKIRGPEKRGADEDDEKEWGDDEEEQPSKRRRVENSIPAAGETQNVEVAAGPAGKCAAVDVEPPSKQKEKAASLKRDMPKVLHDSSKDSITVFVSNLPYSMQEPDTKLRPLFEACGEVVQIRPIFSNRGDFRGYCYVEFKEEKSALQALEMDRKSVEGRPMFVSPCVDKSKNPDFKVFRYSTSLEKHKLFISGLPFSCTKEELEEICKAHGTVKDLRLVTNRAGKPKGLAYVEYENESQASQAVMKMDGMTIKENIIKVAISNPPQRKVPEKPETRKAPGGPMLLPQTYGARGKGRTQLSLLPRALQRPSAAAPQAENGPAAAPAVAAPAATEAPKMSNADFAKLFLRK

SEQ ID NO: 1497 - protein, 316 aa, Homo sapiens
  SITE (62): Xaa equals any of the naturally occurring L-amino acids
  SITE (214): Xaa equals any of the naturally occurring L-amino acids
PWSAAAGLRAGVRVPRSPGPSRRMPARSGAQFCRRMGQKKQRPARAGQPHSSSDAAQAPAEXPHSSSDAAQAPCPRERCLGPPTTPGPYRSIYFSSPKGHLTRLGLEFFDQPAVPLARAFLGQVLVRRLPNGTELRGRIVETEAYLGPEDEAAHSRGGRQTPRNRGMFMKPGTLYVYIIYGMYFCMNISSQGDGACVLLRALEPLEGLETMRQXRSTLRKGTASRVLKDRELCSGPSKLCQALAINKSFDQRDLAQDEAVWLERGPLEPSEPAVVAAARVGVGHAGEWARKPLRFYVRGSPWVSVVDRVAEQDTQA

SEQ ID NO: 1498 - protein, 82 aa, Homo sapiens
KCNYVLSASKFKTYWNVESVVTKYVRRTKGMCKSLMPISSENLSKLTGPAETAHSARRNHDIALPCGRSTCLENTVLYYHYG

SEQ ID NO: 1499 - protein, 75 aa, Homo sapiens
SCCLENYSFLSWSADRNSHTNLIGLKCIFRQQGTKQRGTGLLDWRKSLLAWWAVFQERPCPCSLLGTFQFRFPLV

SEQ ID NO: 1500 - protein, 144 aa, Homo sapiens
KRSWAGGRARRKLFGGLVWILVASSNVPLPLLQGWVMFVSVTAFFFSLLFLGMFLSGMVAQIDANWNFLDFAYHFTVFVFYFGAFLLEAAATSLHDLHCNTTITGQPLLSDNQYNINVAASIFAFMTTACYGCSLGLALRRWRP

SEQ ID NO: 1501 - protein, 123 aa, Homo sapiens
VLPGGSLKVQKCCPKPSLNISGNRSCSTMGVQCPCLPLTQLWFILLVCLHRPDARVPCLILHLLSHWGSLPSDALAKIALVCSRKEGQIPGIVRAAELYRIGLPFPPVWLALHSLQIPPTSTQ

SEQ ID NO: 1502 - protein, 426 aa, Homo sapiens
EIYSLSRFIEVKMSKKISGGSVVEMQGDEMTRIIWELIKEKLIFPYVELDLHSYDLGIENRDATNDQVTKDAAEAIKKHNVGVKCATITPDEKRVEEFKLKQMWKSPNGTIRNILGGTVFREAIICKNIPRLVSGWVKPIIIGRHAYGDQYRATDFVVPGPGKVEITYTPSDGTQKVTYLVHNFEEGGGVAMGMYNQDKSIEDFAHSSFQMALSKGWPLYLSTKNTILKKYDGRFKDIFQEIYDKQYKSQFEAQKIWYEHRLIDDMVAQAMKSEGGFIWACKNYDGDVQSDSVAQGYGSLGMMTSVLVCPDGKTVEAEAAHGTVTRHYRMYQKGQETSTNPIASIFAWTRGLAHRAKLDNNKELAFFANALEEVSIETIEAGFMTKDLAACIKGLPNVQRSDYLNTFEFMDKLGENLKIKLAQAKL

SEQ ID NO: 1503 - protein, 65 aa, Homo sapiens
FNKRKMKYSVAYIFHRAHEHLLYLLGLAKIIYSAALPKCLHTKLKVVLIYVSWKLFIKFKGISFR

SEQ ID NO: 1504 - protein, 82 aa, Homo sapiens
FFVIPSSGSICFCSLVTVLMFNCCTLKPKSVTMHTVTKVLGLQSCLLYKENFKCCCKLTSYTILNFLSSPLFLPTNGIIMLA

SEQ ID NO: 1505 - protein, 82 aa, Homo sapiens
  SITE (63): Xaa equals any of the naturally occurring L-amino acids
EGCAAAMALRMLWAGQAKGILGGWGIICLVMSLLLQHPGVYSKCYFQAQAPCHYEGKYFTLGXSWLRKDCFHCTCLHPVAWA

SEQ ID NO: 1506 - protein, 419 aa, Homo sapiens
  SITE (404): Xaa equals any of the naturally occurring L-amino acids
  SITE (405): Xaa equals any of the naturally occurring L-amino acids
ARVDRETRALADSHFRGLGVDVPGVGQAPGRVAFVSEPGAFSYADFVRGFLLPNLPCVFSSAFTQGWGSRRRWVTPAGRPDFDHLLRTYGDVVVPVANCGVQEYNSNPKEHMTLRDYITYWKEYIQAGYSSPRGCLYLKDWHLCRDFPVEDVFTLPVYFSSDWLNEFWDALDVDDYRFVYAGPAGSWSPFHADIFRSFSWSVNVCGRKKWLLFPPGQEEALRDRHGNLPYDVTSPALCDTHLHPRNQLAGPPLEITQEAGEMVFVPSGWHHQVHNLDDTISINHNWVNGFNLANMWRFLQQELCAVQEEVSEWRDSMPDWHHHCQVIMRSCSGINFEEFYHFLKVIAEKRLLVLREAAAEDGAGLGFEQAAFDVGRITEVLASLVAHPDFQRVDTSAFSPQPKXXLQQLREAVDAAAAP

SEQ ID NO: 1507 - protein, 220 aa, Homo sapiens
PRVRSGRTIMQSAMFLAVQHDCRPMDKSAGSGHKSEEKREKMKRTLLKDWKTRLSYFLQNSSTPGKPKTGKKSKQQAFIKPSPEEAQLWSEAFDELLASKYGLAAFRAFLKSEFCEENIEFWLACEDFKKTKSPQKLSSKARKIYTDFIEKEAPKEINIDFQTKTLIAQNIQEATSGCFTTAQKRVYSLMENNSYPRFLESEFYQDLCKKPQITTEPHAT

SEQ ID NO: 1508 - protein, 339 aa, Homo sapiens
FGTRRSGCPARGHSEPGGREEGGMPQTVILPGPAPWGFRLSGGIDFNQPLVITRITPGSKAAAANLCPGDVILAIDGFGTESMTHADAQDRIKAAAHQLCLKIDRGETHLWSPQVSEDGKAHPFKINLESEPQEFKPIGTAHNRRAQPFVAAANIDDKRQVVSASYNSPIGLYSTSNIQDALHGQLRGLIPSSPQNEPTASVPPESDVYRMLHDNRNEPTQPRQSGSFRVLQGMVDDGSDDRPAGTRSVRAPVTKVHGGSGGAQRMPLCDKCGSGIVGAVVKARDKYRHPECFVCADCNLNLKQKGYFFIEGELYCETHARARTKPPEGYDTVTLYPKA

SEQ ID NO: 1509 - protein, 388 aa, Homo sapiens
  SITE (226): Xaa equals any of the naturally occurring L-amino acids
LGRVSMSLGWLERPPALSRAAGDGARRLSGSRRGDVWLTSSAAGLLRSVAGGSWCGGQLRARGGSGRCVARAMTGNAGEWCLMESDPGVFTELIKGFGCRGAQVEEIWSLEPENFEKLKPVHGLIFLFKWQPGEEPAGSVVQDSRLDTIFFAKQVINNACATQAIVSVLLNCTHQDVHLGETLSEFKEFSQSFDAAMKGLALSNSDVIRQVHNSFARQQMFEFDTXTSAKEEDAFHFVSYVPVNGRLYELDGLREGPIDLGACNQDDWFSAVRPVIEKRIQKYSEGEIRFNLMAIVSDRKMIYEQKIAELQRQLAEEPMDTDQGNSMLSAIQSEVAKNQMLIEEEVQKLKRYKIENIRRKHNYLPFIMELLKTLAEHQQLIPLVEKGK

SEQ ID NO: 1510 - protein, 260 aa, Homo sapiens
  SITE (249): Xaa equals any of the naturally occurring L-amino acids
RGQVPSSSLAHGCVRPGEPSWPGEPSWPARVLRRRQVLYPRFQSRGPQGVEDGDRPQPSSKTPRIPKIYTKTGDKGFSSTFTGERRPKDDQVFEAVGTTDELSSAIGFALELVTEKGHTFAEELQKIQCTLQDVGSALATPCSSAREAHLKYTTFKAGPILELEQWIDKYTSQLPPLTAFILPSGGKISSALHFCRAVCRRAERRVVPLVQMGETDANVAKFLNRLSDYLFTLARYAAMKEGNQEKIYXKNDPSAESEGL

SEQ ID NO: 1511 - protein, 288 aa, Homo sapiens
  SITE (162): Xaa equals any of the naturally occurring L-amino acids
QHFHFRKPTDVLQTVKLLDLSSNQLIDENQLYLIAHLPRLEQLILSDTGISSLHFPDAGIGCKTSMFPSLKYLVVNDNQISQWSFFNELEKLPSLRALSCLRNPLTKEDKEAETARLLIIASIGQLKTLNKCEILPEERRRAELDYRKAFGNEWKQAGGHKXPEKNRLSEEFLTAHPRYQFLCLKYGAPEDWELKTQQPLMLKNQLLTLKIKYPHQLDQKVLEKQLPGSMTIQKVKGLLSRLLKVPVSDLLLSYESPKKPGREIELENDLKSLQFYSVENGDCLLVRW

SEQ ID NO: 1512 - protein, 123 aa, Homo sapiens
  SITE (73): Xaa equals any of the naturally occurring L-amino acids
KCPREPLVHRRFVSTLPIFTALALQAWGSICSSHVKSGPAFLNSVQADLFSCTGISYQPNICIEQRGLCAPPXMAAMMAAVIHAHLQTSQSGSEMSTNICGRKGYTDHPVVLQLYRARKGCGK

SEQ ID NO: 1513 - protein, 108 aa, Homo sapiens
ADGGWGEDFESCEERRYVQSAQSQIHNTCWAMMGLMAVRHPDIEAQERGVRCLLEKQLPNGDWPQENIAGVFNKSCAISYTSYRNIFPIWALGRFSQLYPERALAGHP

SEQ ID NO: 1514 - protein, 33 aa, Homo sapiens
  SITE (3): Xaa equals any of the naturally occurring L-amino acids
SWXSTAVAAALELVDPPGCRNSARVSLFVCFFL

SEQ ID NO: 1515 - protein, 479 aa, Homo sapiens
GTRRPSSSVRSGSWSRLPGYRGASMTTMAAATLLRATPHFSGLAAGRTFLLQGLLRLLKAPALPLLCRGLAVEAKKTYVRDKPHVNVGTIGHVDHGKTTLTAAITKILAEGGGAKFKKYEEIDNAPEERARGITINAAHVEYSTAARHYAHTDCPGHADYVKNMITGTAPLDGCILVVAANDGPMPQTREHLLLARQIGVEHVVVYVNKADAVQDSEMVELVELEIRELLTEFGYKGEETPVIVGSALCALEGRDPELGLKSVQKLLDAVDTYIPVPARDLEKPFLLPVEAVYSVPGRGTVVTGTLERGILKKGDECELLGHSKNIRTVVTGIEMFHKSLERAEAGDNLGALVRGLKREDLRRGLVMVKPGSIKPHQKVEAQVYILSKEEGGRHKPFVSHFMPVMFSLTWDMACRIILPPEKELAMPGEDLKFNLILRQPMILEKGQRFTLRDGNRTIGTGLVTNTLAMTEEEKNIKWG

SEQ ID NO: 1516 - protein, 627 aa, Homo sapiens
RQELIWPLCSPPQGDRFLQKSWIFFRPVMADKLTRIAIVNHDKCKPKKCRQECKKSCPVVRMGKLCIEVTPQSKIAWISETLCIGCGICIKKCPFGALSIVNLPSNLEKETTHRYCANAFKLHRLPIPRPGEVLGLVGTNGIGKSTALKILAGKQKPNLGKYDDPPDWQEILTYFRGSELQNYFTKILEDDLKAIIKPQYVDQIPKAAKGTVGSILDRKDETKTQAIVCQQLDLTHLKERNVEDLSGGELQRFACAVVCIQKADIFMFDEPSSYLDVKQRLKAAITIRSLINPDRYIIVVEHDLSVLDYLSDFICCLYGVPSAYGVVTMPFSVREGINIFLDGYVPTENLRFRDASLVFKVAETANEEEVKKMCMYKYPGMKKKMGEFELAIVAGEFTDSEIMVMLGENGTGKTTFIRMLAGRLKPDEGGEVPVLNVSYKPQKISPKSTGSVRQLLHEKIRDAYTHPQFVTDVMKPLQIENIIDQEVQTLSGGELQRVALALCLGKPADVYLIDEPSAYLDSEQRLMAARVVKRFILHAKKTAFVVEHDFIMATYLADRVIVFDGVPSKNTVANSPQTLLAGMNKFLSQLEITFRRDPNNYRPRINKLNSIKDVEQKKSGNYFFLDD

SEQ ID NO: 1517 - protein, 104 aa, Homo sapiens
  SITE (93): Xaa equals any of the naturally occurring L-amino acids
  SITE (94): Xaa equals any of the naturally occurring L-amino acids
APQPPPTGQSDYTKAWEEYYKKIGQQPQQPGAPPQQDYTKAWEEYYKKQAQVATGGVQELPQAPSQTTVPPGEYYRQQAAYYGQTPGPGGPQXXPTQQGQQQAQ

SEQ ID NO: 1518 - protein, 149 aa, Homo sapiens
HMTTVSPDCVECMACSDNTVRAGLTPKFIDVPTLCEMLSYTPSSSKDRLFLPTRSQEDPYLSIYDPPVPDFTIMKTEVPGSVTEYKVLALDSASILLMVQGTVIASTPTTQTPIPLQRGGVLFIGANESVSLKLTEPKDLLIFRACCLL

SEQ ID NO: 1519 - protein, 616 aa, Homo sapiens
  SITE (12): Xaa equals any of the naturally occurring L-amino acids
  SITE (262): Xaa equals any of the naturally occurring L-amino acids
SWQVQGPPPREXCPSCTQSAIRGSCTLLLRAGEDSADQGRGQQQHFHFHTSIFLRGPPGSSPQPAPLRLRDWALCLGLHNFVSPNWLSRTYSSHVSWITGQAMEIGSAALTILVECWDGHLTPPEVASLADRASRARDSNMVRAAAELALSCLPHAHALNPNEIQRALVQCKEQDNLMLEKACMAVEEAAKGGGVYPEVLFEVAHQWFWLYEQTAGGSSTAREGATSCSASGIRAGGEAGRGMPEGRGGPGTEPVTVAAAQXTAAATVVPVISVGSSLYPGPGLGHGHSPGLHPYTALQPHLPCSPQYLTHPAHPAHPMPHMPRPAVFPVPSSAYPQGVHPAFLGAQYPYSVTPPSLAATAVSFPVPSMAPITVHPYHTEPGLPLPTSVALSSVHPASTFPAIQGASLPALTTQPSPLVSGGFPPPEEETHSQPVNPHSLHHLHAAYRVGMLALEMLGRRAHNDHPNNFSRSPPYTDDVKWLLGLAAKLGVNYVHQFCVGAAKGVLSPFVLQEIVMETLQRLSPAHAHNHLRAPAFHQLVQRCQQAYMQYIHHRLIHLTPADYDDFVNAIRSARSAFCLTPMGMMQFNDILQNLKRSKQTKELWQRVSLEMATFSP

SEQ ID NO: 1520 - protein, 159 aa, Homo sapiens
EGSRPPLCRSCISAESVFQPQLVAPLAPLLPDGHVFVTLENKQPHTHFFFSFKTVTWKYEKARRRSKGCFLEWLRCCPAVVIVFSTGLFPFISCGTESLLPPLLGSPGGPWPPFRLSKKPTTLEIFFLEFRCFLLLPLDKKQLKRPYLRDEKNMHINSI

SEQ ID NO: 1521 - protein, 129 aa, Homo sapiens
  SITE (12): Xaa equals any of the naturally occurring L-amino acids
EWAECRGQLVQXSRPEVSAGSLLLPAPQAEDHSSRILYPRPKSLLPKMMNADMDAVDAENQVELEEKTRLINQVLELQHTLEDLSARVDAVKEENLKLKSENQVLGQYIENLMSASSVFQTTDTKSKRK

SEQ ID NO: 1522 - protein, 109 aa, Homo sapiens
  SITE (58): Xaa equals any of the naturally occurring L-amino acids
  SITE (70): Xaa equals any of the naturally occurring L-amino acids
  SITE (80): Xaa equals any of the naturally occurring L-amino acids
AGTEPGVKCSAKVHDPLRSHWADLTSDSLVVQMPCAAFPEAIGGLPAAEIYAGHPLNXCHSKGGPRCSSXSFTCGGVGEXAVSEMQVPRSHPGLLKGCGICVSDAYYNM

SEQ ID NO: 1523 - protein, 53 aa, Homo sapiens [sequence omitted]

SEQ ID NO: 1524 - protein, 111 aa, Homo sapiens
  SITE (107): Xaa equals any of the naturally occurring L-amino acids
ILNVKIIDLDIESISDSRDTPICLKQPKMYWLWNHVLDRFLRPVSSNLDTVFKGGLLTCTVGQIIQIYLRLGKKVICDFAGRAFAKWSTGSKRVFLERAILSNEVSXRTLG

SEQ ID NO: 1525 - protein, 253 aa, Homo sapiens
LSQRQDQVPRLPVQKSRQESPRAEENPKWREGKKETSESSVQKAGRAAAAQAGAAASRVPGLSGSNLAPCNKGRLSAREDVSNSKMQAQQYQQQRRKFAAAFLAFIFILAAVDTAEAGKKEKPEKKVKKSDCGEWQWSVCVPTSGDCGLGTREGTRTGAECKQTMKTQRCKIPCNWKKQFGAECKYQFQAWGECDLNTALKTRTGSLKRALHNAECQKTVTISKPCGKLTKPKPQAESKKKKKEGKKQEKMLD

SEQ ID NO: 1526 - protein, 93 aa, Homo sapiens
PCTKRNGDCLYPPRFISWPEVILASRKGCTSSHHQLQRMAAIYLSRGFFSREPICPFEEKTKVERMVEDYLASGYQVSRKRTVVKNDMLSSNR

SEQ ID NO: 1527 - protein, 276 aa, Homo sapiens
FFIDHNTKTTTWEDPRLKFPVHMRSKTSLNPNDLGPLPPGWEERIHLDGRTFYIDHNSKITQWEDPRLQNPAITGPAVPYSREFKQKYDYFRKKLKKPADIPNRFEMKLHRNNIFEESYRRIMSVKRPDVLKARLWIEFESEKGLDYGGVAREWFFLLSKEMFNPYYGLFEYSATDNYTLQINPNSGLCNEDHLSYFTFIGRVAGLAVFHGKLLDGFFIRPFYKMMLGKQITLNDMESVDSEYYNSLKWILENDPTELDLMFCIDEENFGQTSTGR

SEQ ID NO: 1528 - protein, 307 aa, Homo sapiens
VMDLVLRVADYYFFTPYVYPATWPEDDIFRQAISLLIVTNVGAYILYFFCATLSYYFVFDHALMKHPQFLKNQVRREIKFTVQALPWISILTVALFLLEIRGYSKLHDDLGEFPYGLFELVVSIISFLFFTDMFIYWIHRGLHHRLVYKRLHKPHHIWKIPTPFASHAFHPIDGFLQSLPYHIYPFIFPLHKVVYLSLYILVNIWTISIHDGDFRVPQILQPFINGSAHHTDHHMFFDYNYGQYFTLWDRIGGSFKNPSSFEGKGPLSYVKEMTEGKRTAIQEMAVRMKNYSMESLQRLNRLLPSYS

SEQ ID NO: 1529 - protein, 233 aa, Homo sapiens
TPYASLPMQTIQENKPATFSSMSHYGNQTLQDLLTSDSLSHSDVMMTQSDPLMSQASTAVSAQNSRRNVMLRNDPMMSFAAQPNQGSLVNQNLLHHQHQTQGALGGSRALSNSVSNMGLSESSSLGSAKHQQQSPVSQSMQTLSDSLSGSSLYSTSANLPVMGHEKFPSDLDLDMFNGSLECDMESIIRSELMDADGLDFNFDSLISTQNVVGLNVGNFTGAKQASSQSWVPG

SEQ ID NO: 1530 - protein, 363 aa, Homo sapiens
  SITE (178): Xaa equals any of the naturally occurring L-amino acids
  SITE (179): Xaa equals any of the naturally occurring L-amino acids
AHRLLVHRDVCHHVSSEVQFGHAGACANQASETAVAKNQALKEAGVFVPRSFDELGEIIQSVYEDLVANGVIVPAQEVPPPTVPMDYSWARELGLIRKPASFMTSICDERGQELIYAGMPITEVFKEEMGIGGVLGLLWFQKRLPKYSCQFIEMCLMVTADHGPAVSGAHNTIICARXXKDLVSSLTSGLLTIGDRFGGALDAAAKMFSKAFDSGIIPMEFVNKMKKEGKLIMGIGHRVKSINNPDMRVQILKDYVRQHFPATPLLDYALEVEKITTSKKPNLILNVDGLIGVAFVDMLRNCGSFTREEADEYIDIGALNGIFVLGRSMGFIGHYLDQKRLKQGLYRHPWDDISYVLPEHMSM

SEQ ID NO: 1531 - protein, 397 aa, Homo sapiens
  SITE (179): Xaa equals any of the naturally occurring L-amino acids
  SITE (180): Xaa equals any of the naturally occurring L-amino acids
  SITE (181): Xaa equals any of the naturally occurring L-amino acids
  SITE (358): Xaa equals any of the naturally occurring L-amino acids
SVSASEVTSTVYNTVSEGTHFLETIETPRPGKLFPKDVSSSTPPSVTSKSRVSRLAGRKTNESVSEPRKGFMYSRNTNENPQECFNASKLLTSHGMGIQVPLNATEFNYLCPAIINQIDARSCLIHTSEKKAEIPPKTYSLQIAWVGGFIAISIISFLSLLGVILVPLMNRVFFKFLLXXXVALAVGTLSGDAFLHLLPHSHASHHHSHSHEEPAMEMKRGPLFSHLSSQNIEESAYFDSTWKGLTALGGLYFMFLVEHVLTLIKQFKDKKKKNQKKPENDDDVEIKKQLSKYESQLSTNEEKVDTDDRTEGYLRADSQEPSHFDSQQPAVLEEEEVMIAHAHPQEVYNEYVPRGCKXKCHSHFHDTLGQSDDLIHHHHDFFKKKKKKKKIKKKQKK

SEQ ID NO: 1532 - protein, 130 aa, Homo sapiens
VWHFILFLCCWLCILEGKKLLKQTSQFFFLFSNYPVGNSQYGQQQDAYQGPPPQQGYPPQQQQYPGQQGYPGQQQGYGPSQGGPGPQYPNYPQGQGQQYGGYRPTQPGPPQPPQQRPYGYDQGQYGNYQQ

SEQ ID NO: 1533 - protein, 53 aa, Homo sapiens [sequence omitted]

SEQ ID NO: 1534 - protein, 93 aa, Homo sapiens
  SITE (14): Xaa equals any of the naturally occurring L-amino acids
  SITE (81): Xaa equals any of the naturally occurring L-amino acids
GASARPPERGPHPXAARDPRGPPLPLSFSSAPTDTFHSEVSPSPLLKSPRSPLHPEVSLYRDPPSFHPEDRPNPRSPPLSXSERASFGPKQPG

SEQ ID NO: 1535 - protein, 150 aa, Homo sapiens
  SITE (75): Xaa equals any of the naturally occurring L-amino acids
  SITE (83): Xaa equals any of the naturally occurring L-amino acids
  SITE (106): Xaa equals any of the naturally occurring L-amino acids
PESLGGSPGPPRPRQSCSETSVVLKCHSPRPGRHRSPESWALGTLEAAAPGTRGRPGAGELRCWERAVFADSGGXGGSRPGSXPGMTMLMELMGQEWERRSAAFCXCASIAKFHSPSSAALLLACGSPRYNFWSCLFLLMSFTVNKFDCH

SEQ ID NO: 1536 - protein, 74 aa, Homo sapiens
LTYSKNAPILSNSMPFDKCSVPMPRPPQSRENIFITPEGLLCSEYSLGVPAAGDIDLFSVTVDEICLLYTIFKN

SEQ ID NO: 1537 - protein, 224 aa, Homo sapiens
GTSRPVAPECTEDGGCCRTVAPSVGSSCHAPAVTQHAPYFKGTAVVNGEFKDLSLDDFKGKYLVLFFYPLDFTFVCPTEIVAFSDKANEFHDVNCEVVAVSVDSHFSHLAWINTPRKNGGLGHMNIALLSDLTKQISRDYGVLLEGSGLALRGLFIIDPNGVIKHLSVNDLPVGRSVEETLRLVKAFQYVETHGEVCPANWTPDSPTIKPSPAASKEYFQKVNQ

SEQ ID NO: 1538 - protein, 524 aa, Homo sapiens
SIMNINDLKLTLSKAGQEHLLRFWNELEEAQQVELYAELQAMNFEELNFFFQKAIEGFNQSSHQKNVDARMEPVPREVLGSATRDQDQLQAWESEGLFQISQNKVAVLLLAGGQGTRLGVAYPKGMYDVGLPSRKTLFQIQAERILKLQQVAEKYYGNKCIIPWYIMTSGRTMESTKEFFTKHKYFGLKKENVIFFQQGMLPAMSFDGKIILEEKNKVSMAPDGNGGLYRALAAQNIVEDMEQRGIWSIHVYCVDNILVKVADPRFIGFCIQKGADCGAKVVEKTNPTEPVGVVCRVDGVYQVVEYSEISLATAQKRSSDGRLLFNAGNIANHFFTVPFLRDVVNVYEPQLQHHVAQKKIPYVDTQGQLIKPDKPNGIKMEKFVFDIFQFAKKFVVYEVLREDEFSPLKNADSQNGKDNPTTARHALMSLHHCWVLNAGGHFIDENGSRLPAIPRSATNGKSETITADVNHNLKDANDVPIQCEISPLISYAGEGLESYVADKEFHAPLIIDENGVHELVKNGI

SEQ ID NO: 1539 - protein, 336 aa, Homo sapiens
HFIFLLKNFQQSSNDTFPTAMHIAAAIEVHEVLLPGLQKLHDALDAKSKEFAQIIKIGRTHTQDAVPLTLGQEFSGYVQQVKYAMTRIKAAMPRIYELAAGGTAVGTGLNTRIGFAEKVAAKVAALTGLPFVTAPNKFEALAAHDALVELSGAMNTTACSLMKIANDIRFLGSGPRSGLGELILPENEPGSSIMPGKVNPTQCEAMTMVAAQVMGNHVAVTVGGSNGHFELNVFKPMMIKNVLHSARLLGDASVSFTENCVVGIQANTERINKLMNESLMLVTALNPHIGYDKAAKIAKTAHKNGSTLKETAIELGYLTAEQFDEWVKPKDMLGPK

SEQ ID NO: 1540 - protein, 126 aa, Homo sapiens
GVVKSLLFTRCNVLVPYKQGWGGEGRAKTNIEILKQQQSEWILFFVIVGGLKNSPHVIIVNTLLCGHCNIWGVGQGGKVTIVHMSLASVQSSVQNVMLFCKKRFMIFKINLVNLFLVVIFFLRQSF

SEQ ID NO: 1541 - protein, 50 aa, Homo sapiens
NSARVCILSRDRVSPCWLGWCLSLDLVIHPPQPPRVLGLQVRATAPGWFS

SEQ ID NO: 1542 - protein, 45 aa, Homo sapiens
DFFLNISEFEGNTDRFLPSSLPITHLSDNTLLIEEVIRIIFKFQI

SEQ ID NO: 1543 - protein, 239 aa, Homo sapiens
IALPPSFQPQSDGRGDASGRNAAMAAQGEPQVQFKLVLVGDGGTGKTTFVKRHLTGEFEKKYVATLGVEVHPLVFHTNRGPIKFNVWDTAGQEKFGGLRDGYYIQAQCAIIMFDVTSRVTYKNVPNWHRDLVRVCENIPIVLCGNKVDIKDRKVKAKSIVFHRKKNLQYYDISAKSNYNFEKPFLWLARKLIGDPNLEFVAMPALAPPEVVMDPALAAQYEHDLEVAQTTALPDEDDDL

SEQ ID NO: 1544 - protein, 109 aa, Homo sapiens
VVTGSGSWHQVASIIRSLTEDNMQNSHMDEYRNSSNGSTGNSSEVVVEHPTDFSTEIMNVTEMEQSPDDSPNVNASTEETEMASAVDLPVTLTETEAISLQNMKNFGKL

SEQ ID NO: 1545 - protein, 199 aa, Homo sapiens
THASGPTRPGKMALAMLVLVVSPWSAARGVLRNYWERLLRKLPQSRPGFPSPPWGPALAVQGPAMFTEPANDTSGSKENSSLLDSIFWMAAPKNRRTIEVNRCRRRNPQKLIKVKNNIDVCPECGHLKQKHVLCAYCYEKVCKETAEIRRQIGKQEGGPFKAPTIETVVLYTGETPSEQDQGKRIIERDRKRPSWFTQN

SEQ ID NO: 1546 - protein, 163 aa, Homo sapiens [sequence omitted]

SEQ ID NO: 1547 - protein, 176 aa, Homo sapiens
STHASAHASGPVPSAASSAGGSGGLSFRAASSLPVSPSLAVSMKAFSPVRSVRKNSLSDHSLGISRSKTPVDDPMSLLYNMNDCYSKLKELVPSIPQNKKVSKMEILQHVIDYILDLQIALDSHPTIVSLHHQRPGQNQASRTPLTTLNTDISILSLQASEFPSELMSNDSKALCG

SEQ ID NO: 1548 - protein, 69 aa, Homo sapiens
  SITE (37): Xaa equals any of the naturally occurring L-amino acids
  SITE (59): Xaa equals any of the naturally occurring L-amino acids
  SITE (63): Xaa equals any of the naturally occurring L-amino acids
KKSLRCEYRIDIERLYMSKTHLSSSHRPLQSGHVGQXGTGAGDAPPGQNAPFVALPDTXYLLXKRETGS

SEQ ID NO: 1549 - protein, 41 aa, Homo sapiens
ILLYKHFHILPLHLTIQHKQLLMALRIVCTCNFEWLYAVSS

SEQ ID NO: 1550 - protein, 61 aa, Homo sapiens
FFAPLKPVRITMEYSSSGKATGEADVHFETHEDAVAAMLKDRSHVHHRYIELFLNSCPKGK

SEQ ID NO: 1551 - protein, 114 aa, Homo sapiens
GSLASFLACSSEFFQPPPTAQFQSHFSTFRYLLQQHLKYLENSFMPASLPDDLNMVLDLEFTFLQGHCLFQRGEFTCARVFTLGVLPELPQDESGEPTTAEKFSQCRNIEEFSK

SEQ ID NO: 1552 - protein, 450 aa, Homo sapiens
  SITE (185): Xaa equals any of the naturally occurring L-amino acids
  SITE (200): Xaa equals any of the naturally occurring L-amino acids
  SITE (414): Xaa equals any of the naturally occurring L-amino acids
  SITE (420): Xaa equals any of the naturally occurring L-amino acids
  SITE (429): Xaa equals any of the naturally occurring L-amino acids
  SITE (442): Xaa equals any of the naturally occurring L-amino acids
TGCGKTTQVTQFILDNYIERGKGSACRIVCTQPRRISAISVAERVAAERAESCGSGNSTGYQIRLQSRLPRKQGSILYCTTGIILQWLQSDPYLSSVSHIVLDEIHERNLQSDVLMTVVKDLLNFRSDLKVILMSATLNAEKFSEYFGNCPMIHIPGFTFPVVEYLLEDVIEKIRYVPEQKEHRXQFKRGFMQGHVNRQXKEEKEAIYKERWPDYVRELRRRYSASTVDVIEMMEDDKVDLNLIVALIRYIVLEEEDGAILVFLPGWDNISTLHDLLMSQVMFKSDKFLIIPLHSLMPTVNQTQVFKRTPPGVRKIVIATNIAETSITIDDVVYVIDGGKIKETHFDTQNNISTMSAEWVSKANAKQRKGRAGRVQPGHCYHLYNGLRASLLDDYQLPEILRTPLEELCLQIKXFKARWXCLFLSRLMXPPSNEAVLLSIRXLMELERFG

SEQ ID NO: 1553 - protein, 446 aa, Homo sapiens
  SITE (61): Xaa equals any of the naturally occurring L-amino acids
  SITE (64): Xaa equals any of the naturally occurring L-amino acids
  SITE (99): Xaa equals any of the naturally occurring L-amino acids
ELLAVVGPVGAGKSSLLSAVLGELAPSHGLVSVHGRIAYVSQQPWVFSGTLRSNILFGKKXEKXRYEKVIKACALKKDLQLLEDGDLTVIGDRGTTLSXGQKARVNLARAVYQDADIYLLDDPLSAVDAEVSRHLFELCICQILHEKITILVTHQLQYLKAASQILILKDGKMVQKGTYTEFLKSGIDFGSLLKKDNEESEQPPVPGTPTLRNRTFSESSVWSQQSSRPSLKDGALESQDTENVPVTLSEENRSEGKVGFQAYKNYFRAGAHWIVFIFLILLNTAAQVAYVLQDWWLSYWANKQSMLNVTVNGGGNVTEKLDLNWYLGIYSGLTVATVLFGIARSLLVFYVLVNSSQTLHNKMFESILKAPVLFFDRNPIGRILNRFSKDIGHLDDLLPLTFLDFIQVTLRVMSGSQMENGSSYFFKPFSWGLGVGLSAWLCVMLT

SEQ ID NO: 1554 - protein, 446 aa, Homo sapiens
RKCELAHCSLGVFGVRMALEGMSKRKRKRSVQEGENPDDGVRGSPPEDYRLGQVASSLFRGEHHSRGGTGRLASLFSSLEPQIQPVYVPVPKQTIKKTKRNEEEESTSQIERPLSQEPAKKVKAKKKHTNAEKKLADRESALASADLEEEIHQKQGQKRKNSQPGVKVADRKILDDTEDTVVSQRKKIQINQEEERLKNERTVFVGNLPVTCNKKKLKSFFKEYGQIESVRFRSLIPAEGTLSKKLAAIKRKIHPDQKNINAYVVFKEESAATQALKRNGAQIADGFRIRVDLASETSSRDKRSVFVGNLPYKVEESAIEKHFLDCGSIMAVRIVRDKMTGIGKGFGYVLFENTDSVHLALKLNNSELMGRKLRVMRSVNKEKFKQQNSNPRLKNVSKPKQGLNFTSKTAEGHPKSLFIGEKAVLLKTKKKGQKKSGRPKKQRKQK

SEQ ID NO: 1555 - protein, 115 aa, Homo sapiens
  SITE (3): Xaa equals any of the naturally occurring L-amino acids
  SITE (19): Xaa equals any of the naturally occurring L-amino acids
  SITE (51): Xaa equals any of the naturally occurring L-amino acids
ATXVQHQRIHTGERPYECXECGKTFSRKDNLTQHKRIHTGEMPYKCNECGXYFSHHSNLIVHQRVHNGARPYKCSDCGKVFRHKSTLVQHESIHTGENPYVAVLWEILWPQIHPH

SEQ ID NO: 1556 - protein, 81 aa, Homo sapiens
CGKTAIRKRKYRSLNNLWVRKASLNNQKLAVLALFSSLFMKMKSEITKCKPGNIILVLLSWIHVKKRLHSLLMLPTSCGFV

SEQ ID NO: 1557 - protein, 398 aa, Homo sapiens
FREMVSSSNLPQGWLEVQGIPEGWDGVAGWYLPGINPGRTARRFAYLFVNINVTSEPHEVLALWFLWYVKQCGGTTRIFSVTNGGQERKFVGGSGQVSERIMDLLGDQVKLNHPVTHVDQSSDNIIIETLNHEHYECKYVINAIPPTLTAKIHFRPELPAERNQLIQRLPMGAVIKCMMYYKEAFWKKKDYCGCMIIEDEDAPISITLDDTKPDGSLPAIMGFILARKADRLAKLHKEIRKKKICELYAKVLGSQEALHPVHYEEKNWCEEQYSGGCYTAYFPPGIMTQYGRVIRQPVGRIFFAGTETATKWSGYMEGAVEAGERAAREVLNGLGKVTEKDIWVQEPESKDVPAVEITHTFWERNLPSVSGLLKIIGFSTSVTALGFVLYKYKLLPRS

SEQ ID NO: 1558 - protein, 401 aa, Homo sapiens
  SITE (58): Xaa equals any of the naturally occurring L-amino acids
SLAAPGIPEHRQRGTEKESFFLGSQSRKGGAALAPSAGPAPRMRADAGGRGCGSANGXPGAPHVRAAGPAAAAVPGARVVCGGSRPRQQVDSSKESAEAACDILSQLVNCSLKTLGLISTARPSFMDLPKSHFISALTVVFVNSKSLSSLKIDDTPVDDPSLKVLVANNSDTLKLLKMSSCPHVSPAGILCVADQCHGLRELALNYHLLSDELLLALSSEKHVRLEHLRIDVVSENPGQTHFHTIQKSSWDAFIRHSPKVNLVMYFFLYEEEFDPFFRYEIPATHLYFGRSVSKDVLGRVGMTCPRLVELVVCANGLRPLDEELIRIAERCKNLSAIGLGECEVSCSAFVEFVKMCGGRLSQLSIMEEVLIPDQKYSLEQIHWEVSKHLGRVWFPDMMPTW

SEQ ID NO: 1559 - protein, 108 aa, Homo sapiens
AGAGGRVGDRAGVRERQQSGHRHSEQPRRRLCVPVDCLAAPSPTPRFLVKRLRAAVWGGGVWSRVLCPQWLLSGGRLFAEVRRDSLGVEHITGFGCLVCEHHRVCGCT

SEQ ID NO: 1560 - protein, 68 aa, Homo sapiens
ELSPLSFRSTRGFHTYFIEHPFIFISVYRTKKNSSVKNLCCGLSIFAAFGLRWRIKASLPLSSVFRKL

SEQ ID NO: 1561 - protein, 80 aa, Homo sapiens
LMMTIYALSNEFAFKINEEQLSFFPLLSVQLWHAQRFLLDSSWSGVIPFFFSCSCLPFLYPPKWRQIHDLKDTQYLLNSS

SEQ ID NO: 1562 - protein, 198 aa, Homo sapiens
  SITE (4): Xaa equals any of the naturally occurring L-amino acids
  SITE (193): Xaa equals any of the naturally occurring L-amino acids
RGLXSRGAGQVPGCLGWHRSVVPGGAVAALPPSRRQRVRGPVRPEPGATPRAVLGETRVPVLRLLLGSALVGRLLDSLKRDYAGKPQPPIKSERRNPPSYAMAGKKVLIVYAHQEPKSFNGSLKNVAVDELSRQGCTVTVSDLYAMNFEPRATDKDITGTLSNPEVFNYGVETHEAYKQRSLASDITDEQKKXSGRLT

SEQ ID NO: 1563 - protein, 488 aa, Homo sapiens
GREASKMAQTQGTRRKVCYYYDGDVGNYYYGQGHPMKPHRIRMTHNLLLNYGLYRKMEIYRPHKANAEEMTKYHSDDYIKFLRSIRPDNMSEYSKQMQRFNVGEDCPVFDGLFEFCQLSTGGSVASAVKLNKQQTDIAVNWAGGLHHAKKSEASGFCYVNDIVLAILELLKYHQRVLYIDIDIHHGDGVEEAFYTTDRVMTVSFHKYGEYFPGTGDLRDIGAGKGKYYAVNYPLRDGIDDESYEAIFKPVMSKVMEMFQPSAVVLQCGSDSLSGDRLGCFNLTIKGHAKCVEFVKSFNLPMLMLGGGGYTIRNVARCWTYETAVALDTEIPNELPYNDYFEYFGPDFKLHISPSNMTNQNTNEYLEKIKQRLFENLRMLPHAPGVQMQAIPEDAIPEESGDEDEDDPDKRISICSSDKRIACEEEFSDSEEEGEGGRKNSSNFKKAKRVKTEDEKEKDPEEKKEVTEEEKTKEEKPEAKGVKEEVKLA

SEQ ID NO: 1564 - protein, 197 aa, Homo sapiens
  SITE (155): Xaa equals any of the naturally occurring L-amino acids
  SITE (178): Xaa equals any of the naturally occurring L-amino acids
  SITE (179): Xaa equals any of the naturally occurring L-amino acids
  SITE (187): Xaa equals any of the naturally occurring L-amino acids
  SITE (189): Xaa equals any of the naturally occurring L-amino acids
ARSSLWRRQPGWQLTGQPGSILLRVFSKSRAGLEARKLKAYRTMEYMAESTDRSPGHILCCECGVPISPNPANICVACLRSKVDISQGIPKQVSISFCKQCQRYFQPPGTWIQCALESRELLALCLKKIKAPLSKVRLVDAGFVWTEPHSKRLKXKLTIQKEVMNGAILQQVFVVDYXXPKWGEMAXRXLRILERLD

SEQ ID NO: 1565 - protein, 197 aa, Homo sapiens
  SITE (179): Xaa equals any of the naturally occurring L-amino acids
  SITE (189): Xaa equals any of the naturally occurring L-amino acids
  SITE (190): Xaa equals any of the naturally occurring L-amino acids
MQFAWQSYKRYAMGKNELRPLTKDGYEGNMFGGLSGATVIDSLDTLYLMELKEEFQEAKAWVGESFHLNVSGEASLFEVNIRYIGGLLSAFYLTGEEVFRIKAIRLGEKLLPAFNTPTGIPKGVVSFKSGNWGWATAGSSSILAEFGSLHLEFLHLTELSGNQVFAEKVRNIRKVLRKXEKPFGLYSNXXMVLQTDP

SEQ ID NO: 1566 - protein, 240 aa, Homo sapiens
ADPEGQAGRAGRALRRHGHLHEGSDRAGRRAVQRGAQPALRGLQERGRGPQSAWRVISSIEQKTDTSDKKLQLIKDYREKVESELRSICTTVLELLDKYLIANATNPESKVFYLKMKGDYFRYLAEVACGDDRKQTIDNSQGAYQEAFDISKKEMQPTHPIRLGLALNFSVFYYEILNNPELACTLAKTAFDEAIAELDTLNEDSYKDSTLIMQLLRDNLTLWTSDSAGEECDAAEGAEN

SEQ ID NO: 1567 - protein, 220 aa, Homo sapiens
  SITE (41): Xaa equals any of the naturally occurring L-amino acids
KARRRGTMAAAADERSPEDGEDEEEEEQLVLVELSGIIDSXFLSKCENKCKVLGIDTERPILQVDSCVFAGEYEDTLGTCVIFEENVEHADTEGNNKTVLKYKCHTMKKLSMTRTLLTEKKEGEENIGGVEWLQIKDNDFSYRPNMICNFLHENEDEEVVASAPDKSLELEEEEIQMNDSSNLSCEQEKPMHLEIEDSGPLIDIPSETEGSVFMETQMLP

SEQ ID NO: 1568 - protein, 180 aa, Homo sapiens
  SITE (8): Xaa equals any of the naturally occurring L-amino acids
  SITE (12): Xaa equals any of the naturally occurring L-amino acids
AWQEFGQXPGAXWQRRCACVVECSGRRPAGAMVFLTAQLWLRNRVTDRYFRIQEVLKHARHFRGRKNRCYRLAVRTVIRAFVKCTKARYLKKKNMRTLWINRITAASQEHGLKYPALIGNLVKCQVELNRKVLADLAIYEPKTFKSLAALASRRRHEGFAAALGDGKEPEGIFSRVVQYH

SEQ ID NO: 1569 - protein, 160 aa, Homo sapiens
AGPYADSIWAPARSAAGQRGVAMAELQQLRVQEAVESMVKSLERENIRKMQGLMFRCSASCCEDSQASMKQVHQCIERCHVPLAQAQALVTSELEKFQDRLARCTMHCNDKAKDSIDAGSKELQVKQQLDSCVTKCVDDHMHLIPTMTKKMKEALLSIGK

SEQ ID NO: 1570 - protein, 77 aa, Homo sapiens
  SITE (13): Xaa equals any of the naturally occurring L-amino acids
GLSDHLVFPFSAXHVSRGVAPYHTSRAPEPYFLISSGLDFPVLHQQLQYPKLSSPADPPSNGVETGGQCLVCFLRNL

SEQ ID NO: 1571 - protein, 218 aa, Homo sapiens
EGPIPWGRRRREPEPLLPMAKKTYDLLFKLLLIGDSGVGKTCVLFRFSDDAFNTTFISTIGIDFKIKTVELQGKKIKLQIWDTAGQERFHTITTSYYRGAMGIMLVYDITNGKSFENISKWLRNIDEHANEDVERMLLGNKCDMDDKRVVPKGKGEQIAREHGIRFFETSAKANINIEKAFLTLAEDILRKTPVKEPNSENVDISSGGGVTGWKSKCC

SEQ ID NO: 1572 - protein, 265 aa, Homo sapiens
RNLLAWPRRLSGIARALRFIATPRLSAMPHIDNDVKLDFKDVLLRPKRSTLKSRSEVDLTRSFSFRNSKQTYSGVPIIAANMDTVGTFEMAKVLCKFSLFTAVHKHYSLVQWQEFAGQNPDCLEHLAASSGTGSSDFEQLEQILEAIPQVKYICLDVANGYSEHFVEFVKDVRKRFPQHTIMAGNVVTGEMVEELILSGADIIKVGIGPGSVCTTRKKTGVGYPQLSAVMECADAAHGLKGTSFQMEVAAVLGMWPRLLGQELTS

SEQ ID NO: 1573 - protein, 128 aa, Homo sapiens
ETTTTTLWRRNANGDPVCNACGLYYKLHNVNRPLTMKKEGIQTRNRKMSNKSKKSKKGAECFEELSKCMQEKSSPFSAAALAGHMAPVGHLPPFSHSGHILPTPTPIHPSSSLSFGHPHPSSMVTAMG

SEQ ID NO: 1574 - protein, 334 aa, Homo sapiens
  SITE (4): Xaa equals any of the naturally occurring L-amino acids
GARXDRALLRPPLLRELTPRSPRPPLAPAARPSWPCLCLDGGVSGVFVWDEERIQEEELQRSINEMKRLEEMSNMFQSSGVQHHPPEPKAQTEGNEDSEGKEQRWEMVMDKKHFKLWRRPITGTHLYQYRVFGTYTDVTPRQFFNVQLDTEYRKKWDALVIKLEVIERDVVSGSEVLHWVTHFPYPMYSRDYVYVRRYSVDQENNMMVLVSRAVEHPSVPESPEFVRVRSYESQMVIRPHKSFDENGFDYLLTYSDNPQTVFPRYCVSWMVSSGMPDFLEKLHMATLKAKNMEIKVKDYISAKPLEMSSEAKATSQSSERKNEGSCGPARIEYA

SEQ ID NO: 1575 - protein, 335 aa, Homo sapiens
  SITE (125): Xaa equals any of the naturally occurring L-amino acids
  SITE (218): Xaa equals any of the naturally occurring L-amino acids
  SITE (219): Xaa equals any of the naturally occurring L-amino acids
  SITE (268): Xaa equals any of the naturally occurring L-amino acids
PSAPRALTLQRRKIGRRGQALMLVSGRRRLLTVLLQAQKWPFQPSRDMRLVQFRAPHLVGPHLGLETGNGGGVINLNAFDPTLPKTMTQFLEQGEATLSVARRALAAQLPVLPRSEVTFLAPVTXPDKVVCVGMNYVDHCKEQNVPVPKEPIIFSKFASSIVGPYDEVVLPPQSQEVDWEVELAVVIGKKGKHIKATDAMAHVAGFTVAHDVSARDWXXRRNGKQWLLGKTFDTFCPLGPALVTKDSVADPHNLKICCRVNGEVVQSXNTNQMVFKTEDLIAWVSQFVTFYPGDVILTGTPPGVGVFRKPPVFLKKGDEVQCEIEELGVIINKVV

SEQ ID NO: 1576 - protein, 113 aa, Homo sapiens
IPEDPHIDESKAKHQAIIMSTSLRVSPSIHGYHFDTASRKKAVGNIFENTDQESLERLFRNSGDKKAEERAKIIFAIDQDVEEKTRALMALKKRTKDKLFQFLKLRKYSIKVH

SEQ ID NO: 1577 - protein, 212 aa, Homo sapiens
  SITE (5): Xaa equals any of the naturally occurring L-amino acids
GASWXALTAASAPGPWPLSGMACGATLKRPMEFEAALLSPGSPKRRRCAPLPGPTPGLRPPDAEPPPPFQTQTPPQSLQQPAPPGSERRLPTPEQIFQNIKQEYSRYQRWRHLEVVLNQSEACASESQPHSSALTAPSSPGSSWMKKDQPTFTLRQVGIICERLLKDYEDKIREEYEQILNTKLAEQYESFVKFTHDQIMRRYGTRPTSYVS

SEQ ID NO: 1578 - protein, 393 aa, Homo sapiens
  SITE (209): Xaa equals any of the naturally occurring L-amino acids
RRRREAQEKRYYYDLDDSYDESDEEEVRAHLRCVAEQPPLKLDTSSEKLEFLQLFGLTTQQQKEELVAQKRRKRRRMLRERSPSPPTIQSKRQTPSPRLALSTRYSPDEMNNSPNFEEKKKFLTIFNLTHISAEKRKDKERLVEMLRAMKQKALSAAVADSLTNSPRDSPAVSLSEPATQQASLDVEKPVGVAASLSDIPKAADLGSWXQVRPQELSRVQELAPASGEKGQAERGPWRQKESEHASLYPGRCTQGHSCAAVPQHQWEEQAVGALCGRRVCTSVPRVQCCSPPRRPCRSIKGAWLCCLQSRTTRLTRPSTTTFLSCSPPAAPLHPSTMGSRSPPLQGRAPQPRSWTGTRRRRKRRMMKMEKMRRKSPSASGKGSRPFLKLTRNT

SEQ ID NO: 1579 - protein, 39 aa, Homo sapiens
  SITE (3): Xaa equals any of the naturally occurring L-amino acids
  SITE (10): Xaa equals any of the naturally occurring L-amino acids
QAXTTLTKGXKSWSSTAVAAALELVDPPGCRNSARGRRN

SEQ ID NO: 1580 - protein, 286 aa, Homo sapiens
  SITE (171): Xaa equals any of the naturally occurring L-amino acids
  SITE (237): Xaa equals any of the naturally occurring L-amino acids
PTRPPTRPPTRPVPASESAVVVQTECSLLFVWLRFHARRWLRMSSSHFASRHRKDISTEMIRTKIAHRKSLSQKENRHKEYERNRHFGLKDVNIPTLEGRILVELDETSQGLVPEKTNVKPRAMKTILGDQRKQMLQKYKEEKQLQKLKEQREKAKRGIFKVGRYRPDMPXFLLSNQNAVKAEPKKAIPSSVRITRSKAKDQMEQTKIDNESDVRAIRPGPRQTSEKKVSDKEKKVXQPVMPTSLRMTRSATQAAKQVPRTVSSTTARKPVTRAANENGTRRKGAK

SEQ ID NO: 1581 - protein, 276 aa, Homo sapiens
DRRGIGIMAAALFVLLGFALLGTHGASGAAGTVFTTVEDLGSKILLTCSLNDSATEVTGHRWLKGGVVLKEDALPGQKTEFKVDSDDQWGEYSCVFLPEPMGTANIQLHGPPRVKAVKSSEHINEGETAMLVCKSESVPPVTDWAWYKITDSEDKALMNGSESRFFVSSSQGRSELHIENLNMEADPGQYRCNGTSSKGSDQAIITLRVRSHLAALWPFLGIVAEVLVLVTIIFIYEKRRKPEDVLDDDDAGSAPLKSSGQHQNDKGKNVRQRNSS

SEQ ID NO: 1582 - protein, 476 aa, Homo sapiens
  SITE (8): Xaa equals any of the naturally occurring L-amino acids
  SITE (136): Xaa equals any of the naturally occurring L-amino acids
  SITE (271): Xaa equals any of the naturally occurring L-amino acids
TISFPGRXLDKFIKFFALKTVQVIVQARLGEKICTRSSSSPTGSDWFNLAIKDIPEVTHEAKKALAGQLPAVGRSMCVEISLKTSEGDSMELEIWCLEMNEKCDKEIKVSYTVYNRLSLLLKSLLAITRVTPAYRXSRKQGHEYVILYRIYFGEVQLSGLGEGFQTVRVGTVGTPVGTITLSCAYRINLAFMSTRQFERTPPIMGIIIDHFVDRPYPSSSPMHPCNYRTAGEDTGVIYPSVEDSQEVCTTSFSTSPPSQLMVPGKEGGVPXAPNQPVHGTQADQERLATCTPSDRTHCAATPSSSEDTETVSNSSEGRASPHDVLETIFVRKVGAFVNKPINQVTLTSLDIPFAMFAPKNLELEDTDPMVNPPDSPETESPLQGSLHSDGSSGGSSGNTHDDFVMIDFKPAFSKDDILPMDLGTFYREFQNPPQLSSLSIDIGAQSMAEDLDSLPEKLAVHEKNVREFDAFVETLQ

SEQ ID NO: 1583 - protein, 569 aa, Homo sapiens
  SITE (2): Xaa equals any of the naturally occurring L-amino acids
  SITE (34): Xaa equals any of the naturally occurring L-amino acids
  SITE (188): Xaa equals any of the naturally occurring L-amino acids
  SITE (291): Xaa equals any of the naturally occurring L-amino acids
  SITE (345): Xaa equals any of the naturally occurring L-amino acids
  SITE (346): Xaa equals any of the naturally occurring L-amino acids
  SITE (552): Xaa equals any of the naturally occurring L-amino acids
  SITE (553): Xaa equals any of the naturally occurring L-amino acids
  SITE (554): Xaa equals any of the naturally occurring L-amino acids
GXKSWCSTAVAAALELVDPPGCRNSARVLAVVAXVLKLGNIEFKPESRVNGLDESKIKDKNELKEICELTGIDQSVLERAFSFRTVEAKQEKVSTTLNVAQAYYARDALAKNLYSRLFSWLVNRINESIKAQTKVRKKVMGVLDIYGFEIFEDNSFEQFIINYCNEKLQQIFIELTLKEEQEEYIREXIEWTHIDYFNNAIICDLIENNTNGILAMLDEECLRPGTVTDETFLEKLNQVCATHQHFESRMSKCSRFLNDTSLPHSCFRIQHYAGKVLYQVEGFVDKNNDLXYRDLSQAMWKASHALIKSLFPEGNPAKINLKRPPTAGSQFKASVATLMKNLQTXXPNYIRCIKPNDKKAAHIFNEALVCHQIRYLGLLENVRVRRAGYAFRQAYEPCLERYKMLCKQTWPHWKGPARSGVEVLFNELEIPVEEYSFGRSKIFIRNPRTLFKLEDLRKQRLEDLATLIQKIYRGWKCRTHFLLMKKSQIVIAAWYRRYAQQKRYQQTKSSALVIQSYIRGWKARKILRELKHQKRCKEAVTTIAAYWHGTQXXXKNQEILQSQCWKRKS

SEQ ID NO: 1584 - protein, 267 aa, Homo sapiens
RVDPRVRILGAGEEAGSPSLHVRDLTVEMAAQKINEGLEHLAKAEKYLKTGFLKWKPDYDSAASEYGKAAVAFKNAKQFEQAKDACLREAVAHENNRALFHAAKAYEQAGMMLKEMQKLPEAVQLIEKASMMYLENGTPDTAAMALERAGKLIENVDPEKAVQLYQQTANVFENEERLRQAVELLGKASRLLVRGRRFDEAALSIQKEKNIYKEIENYPTCYKKTIAQVLVHLHRNDYVAAERCVRESYSIPGFNGSEDCAALGTAS

SEQ ID NO: 1585 - protein, 214 aa, Homo sapiens
  SITE (1): Xaa equals any of the naturally occurring L-amino acids
  SITE (2): Xaa equals any of the naturally occurring L-amino acids
  SITE (3): Xaa equals any of the naturally occurring L-amino acids
  SITE (12): Xaa equals any of the naturally occurring L-amino acids
XXXQTSPVLCNXPRRHRAPWPSYNDEDIYLFNSSHSDGAQYVKRYKGHRNNATVKGVNFYGPKSEFVVSGSDCGHIFLWEKSSCQIIQFMEGDKGGVVNCLEPHPHLPVLATSGLDHDVKIWAPTAEASTELTGLKDVIKKNKRERDEDSLHQTDLFDSHMLWFLMHHLRQRRHHRRWREPGVGATDADSDESPSSSDTSDEEEGPDRVQCMPS

SEQ ID NO: 1586 - protein, 74 aa, Homo sapiens
  SITE (7): Xaa equals any of the naturally occurring L-amino acids
QITPNKXGHRESARRPVIQGPFLLDVKESWVKCGCNLNQLVLVICFCPLCFLLSNAKCVFCSHELKHKKMHETL

SEQ ID NO: 1587 - protein, 412 aa, Homo sapiens
  SITE (296): Xaa equals any of the naturally occurring L-amino acids
SGTHHFSCVLGSFRVSAMFPRVSTFLPLRPLSRHPLSSGSPETSAAAIMLLTVRHGTVRYRSSALLARTKNNIQRYFGTNSVICSKKDKQSVRTEETSKETSESQDSEKENTKKDLLGIIKGMKVELSTVNVRTTKPPKRRPLKSLEATLGRLRRATEYAPKKRIEPLSPELVAAASAVADSLPFDKQTTKSELLSQLQQHEEESRAQRDAKRPKISFSNIISDMKVARSATARVRSRPELRIQFDEGYDNYPGQEKTDDLKKRKNIFTGKRLNIFDMMAVTKEAPETDTSPSLWXVEFAKQLATVNEQPLQNGFEELIQWTKEGKLWEFPINNEAGFDDDGSEFHEHIFLEKHLESFPKQGPIRHFMELVTCGLSKNPYLSVKQKVEHIEWFRNYFNEKKDILKESNIQFN

SEQ ID NO: 1588 - protein, 44 aa, Homo sapiens
AIHSLQQFDKIYFCEQKLRHLHFLPMWSLQTWETIHEYLYCMVI

SEQ ID NO: 1589 - protein, 214 aa, Homo sapiens
VGETQHALRPLCKQHPVPPSSPRPSEEMVKMVLSRPCHPDDQFTTSILRHWCMKHDELLAEHIKSLLIKNNSLPRKRQSLRSSSSKLAQLTLEQILEHLDNLRLNLTNTKQNFFSQTPILQALQHVQASCDEAHKMKFSDLFSLAEEYEDSSTKPPKSRRKAALSSPRSRKNATQPPNAEEESGSSSASEEEDTKPKPTKRKRKGSSAVGSDSD

SEQ ID NO: 1590 - protein, 200 aa, Homo sapiens
  SITE (27): Xaa equals any of the naturally occurring L-amino acids
KMHILHADIKPDNILVNESKTILKLCXFGSASHVADNDITPYLVSRFYRAPEIIIGKSYDYGIDMWSVGCTLYELYTGKILFPGKTNNHMLKLAMDLKGKMPNKMIRKGVFKDQHFDQNLNFMYIEVDKVTEREKVTVMSTINPTKDLLADLIGCQRLPEDQRKKVHQLKDLLDQILMLDPAKRISINQALQHAFIQEKI

SEQ ID NO: 1591 - protein, 115 aa, Homo sapiens [sequence omitted]

SEQ ID NO: 1592 - protein, 66 aa, Homo sapiens
VCCCKKSPMCITNSEYFLRLKKTGVTSRYCCVMVTLTKRHQPLRVLYCKAQITFVCYTLIGELKVI

SEQ ID NO: 1593 - protein, 91 aa, Homo sapiens
ESLWAFCLSLLERLACCSLLYPEVCLWDFSPVAVETRRPTLFETQMLLSLASPSLSSPNEPTFCTSTRMPGRLGPQRLLFQNLWKPRLNVP

SEQ ID NO: 1594 - protein, 442 aa, Homo sapiens
  SITE (22): Xaa equals any of the naturally occurring L-amino acids
LEQELGDGWGHSDLHKALLCRXPPLPEPDAMSSKGSVVLAYSGGLDTSCILVWLKEQGYDVIAYLANIGQKEDFEEARKKALKLGAKKVFIEDVSREFVEEFIWPAIQSSALYEDRYLLGTSLARPCIARKQVEIAQREGAKYVSHGATGKGNDQVRFELSCYSLAPQIKVIAPWRMPEFYNRFKGRNDLMEYAKQHGIPIPVTPKNPWSMDENLMHISYEAGILENPKNQAPPGLYTKTQDPAKAPNTPDILEIEFKKGVPVKVTNVKDGTTHQTSLELFMYLNEVAGKHGVGRIDIVENRFIGMKSRGIYETPAGTILYHAHLDIEAFTMDREVRKIKQGLGLKFAELVYTGFWHSPECEFVRHCIAKSQERVEGKVQVSVLKGQVYILGRESPLSLYNEELVSMNVQGDYEPTDATGFININSLRLKEYHRLQSKVTAK

SEQ ID NO: 1595 - protein, 456 aa, Homo sapiens
FGTSQFLLPLPAKMSDMEDDFMCDDEEDYDLEYSEDSNSEPNVDLENQYYNSKALKEDDPKAALSSFQKVLELEGEKGEWGFKALKQMIKINFKLTNFPEMMNRYKQLLTYIRSAVTRNYSEKSINSILDYISTSKQMDLLQEFYETTLEALKDAKNDRLWFKTNTKLGKLYLEREEYGKLQKILRQLHQSCQTDDGEDDLKKGTQLLEIYALEIQMYTAQKNNKKLKALYEQSLHIKSAIPHPLIMGVIRECGGKMHLREGEFEKAHTDFFEAFKNYDESGSPRRTTCLKYLVLANMLMKSGINPFDSQEAKPYKNDPEILAMTNLVSAYQNNDITEFEKILKTNHSNIMDDPFIREHIEELLRNIRTQVLIKLIKPYTRIHIPFISKELNIDVADVESLLVQCILDNTIHGRIDQVNQLLELDHQKRGGARYTALDKWTNQLNSLNQAVVSKLA

SEQ ID NO: 1596 - protein, 375 aa, Homo sapiens
  SITE (176): Xaa equals any of the naturally occurring L-amino acids
SFGERAPSTRSGDPLVAVLPTRTRVPQASRCPAGSSCPTPGARPPASPGPLPRPSSRRARSMAPPQVLAFGLLLAAATATFAAAQEECVCENYKLAVNCFVNNNRQCQCTSVGAQNTVICSKLAAKCLVMKAEMNGSKLGRRAKPEGALQNNDGLYDPDCDESGLFKAKQCNGTSXCWCVNTAGVRRTDKDTEITCSERVRTYWIIIELKHKAREKPYDSKSLRTALQKEITTRYQLDPKFITSILYENNVITIDLVQNSSQKTQNDVDIADVAYYFEKDVKGESLFHSKKMDLTVNGEQLDLDPGQTLIYYVDEKAPEFSMQGLKAGVIAVIVVVVIAVVAGIVVLVISRKKRMAKYEKAEIKEMGEMHRELNA

SEQ ID NO: 1597 - protein, 83 aa, Homo sapiens
  SITE (71): Xaa equals any of the naturally occurring L-amino acids
ALGPQASPLQSLAASLDAEPSSAAVPDGFPAGPTVSPRRLARPPGLEEALSALGLQGERDTPGTSSPKSWXGSRERQKHSVGE

SEQ ID NO: 1598 - protein, 103 aa, Homo sapiens
QPEVPDRRCVIHRRRRYGSSTEAHAKLSTMASSTVPVSAAGSANETPEIPDNVGDWLRGVYRFATDRNDFRRNLILNLGLFAAGVWLARNLSDIDLMAPQPGV

SEQ ID NO: 1599 - protein, 154 aa, Homo sapiens
  SITE (125): Xaa equals any of the naturally occurring L-amino acids
  SITE (135): Xaa equals any of the naturally occurring L-amino acids
RRTYYGKTWNCRARYLVRNSRVDPRVRADWGGGGLARPGLACQGAGGGGSSTMSLQYGAEETPLAGSYGAADSFPKDFGYGVEEEEEEAAAAGGGVGAGAGGGCGPGGADSSKPRILLMGTPAQXKFLHPESGVXIKMFNQRDPLFLGNYQTRF

SEQ ID NO: 1600 - protein, 108 aa, Homo sapiens
  SITE (24): Xaa equals any of the naturally occurring L-amino acids
  SITE (27): Xaa equals any of the naturally occurring L-amino acids
  SITE (68): Xaa equals any of the naturally occurring L-amino acids
GCSFKWGLTGNVTLSRDVREVDPXQGXPGRGTGCALPQSENLLYVVRKEQGDQAESWAGVEWKERRLXRTGGGGPWLLLSEMGTTGGFEQRSALIDLYFARVILAAIL

SEQ ID NO: 1601 - protein, 253 aa, Homo sapiens
APRSPRGRCGGTRAEAAAATWAAAGPRRRAVRMSGWADERGGEGDGRIYVGNLPTDVREKDLEDLFYKYGRIREIELKNRHGLVPFAFVRFEDPRDAEDAIYGRNGYDYGQCRLRVEFPRTYGGRGGWPRGGRNGPPTRRSDFRVLVSGLPPSGSWQDLKDHMREAGDVCYADVQKDGVGMVEYLRKEDMEYALRKLDDTKFRSHEGETSYIRVYPERSTSYGYSRSRSGSRGRDSPYQSRGSPHYFSPFRPY

SEQ ID NO: 1602 - protein, 310 aa, Homo sapiens
PRAARPPAMEPGPDGPAASGPAAIREGWFRETCSLWPGQALSLQVEQLLHHRRSRYQDILVFRSKTYGNVLVLDGVIQCTERDEFSYQEMIANLPLCSHPNPRKVLIIGGGDGGVLREVVKHPSVESVVQCEIDEDVIQVSKKFLPGMAIGYSSSKLTLHVGDGFEFMKQNQDAFDVIITDSSDPMGPAESLFKESYYQLMKTALKEDGVLCCQGECQWLHLDLIKEMRQFCQSLFPVVAYAYCTIPTYPSGQIGFMLCSKNPSTNFQEPVQPLTQQQVAQMQLKYYNSDVHRAAFVLPEFARKALNDVS

SEQ ID NO: 1603 - protein, 41 aa, Homo sapiens
  SITE (20): Xaa equals any of the naturally occurring L-amino acids
  SITE (27): Xaa equals any of the naturally occurring L-amino acids
  SITE (31): Xaa equals any of the naturally occurring L-amino acids
VNVSGFVQGTCKGFGSMVRXERQELEXMLLXKSRDINFGVT

SEQ ID NO: 1604 - protein, 132 aa, Homo sapiens
SAWRSPNTAVQPAACPKQCNPETRPVEKKIRSALPTKTVKPVENKDDDDSIADFLNSDEEEDRVSLQNLKNLGESATLRSLLLNPHLRQLMVNLDQGEDKAKLMRAYMQEPLFVEFADCCLGIVEPSQNEES

SEQ ID NO: 1605 - protein, 326 aa, Homo sapiens
  SITE (30): Xaa equals any of the naturally occurring L-amino acids
  SITE (31): Xaa equals any of the naturally occurring L-amino acids
  SITE (116): Xaa equals any of the naturally occurring L-amino acids
  SITE (182): Xaa equals any of the naturally occurring L-amino acids
  SITE (226): Xaa equals any of the naturally occurring L-amino acids
  SITE (285): Xaa equals any of the naturally occurring L-amino acids
  SITE (287): Xaa equals any of the naturally occurring L-amino acids
  SITE (290): Xaa equals any of the naturally occurring L-amino acids
  SITE (298): Xaa equals any of the naturally occurring L-amino acids
  SITE (306): Xaa equals any of the naturally occurring L-amino acids
PRIHLENVSEDEINRLLGMVVDVENLFMSXXKEEDTDTKQVYFYLFKLLRKCILQMTRPVVEGSLGSPPFEKPNIEQGVLNFVQYKFSHLAPRERQTMFELSKMFLLCLNYWKLEXPAQFRQRSQAEDVATYKVNYTRWLCYCHVPQSCDSLPRYETTHVFGRSLLRSIFTVTRRQLLEKFXVEKDKLVPEKRTSSSLTSPSKAPSGLPGFGPKFTSSLLSPFFQXGFLDWSLLSLHGPFGIWASTWQTCPWPRSNLLVLVWGWQIPVHAGGGDLWGKLSNLGVXLXHAXLRGDTAGXPGQLQSVXGLFPAPPSSAPAWVGAATAP

SEQ ID NO: 1606 - protein, 94 aa, Homo sapiens
  SITE (32): Xaa equals any of the naturally occurring L-amino acids
  SITE (35): Xaa equals any of the naturally occurring L-amino acids
  SITE (70): Xaa equals any of the naturally occurring L-amino acids
FGTWKKKKKTLRDSLCEELLTESLSTFLPPDXEDXGVSVSVLSPLLFPNQGLCHYCPSQLSMQEDRVAWXSYPCPSPKGSTRKLKRLKKKRVCS

SEQ ID NO: 1607 - protein, 246 aa, Homo sapiens
AAAWCARLAGDGIRRTWTPPEWKPKQELLLLRGCRSRREPPDRRQSEEGATRLGKMTQFLPPNLLALFAPRDPIPYLPPLEKLPHEKHHNQPYCGIAPYIREFEDPRDAPPPTRAETREERMERKRREKIERRQQEVETELKMWDPHNDPNAQGDAFKTLFVARVNYDTTESKLRREFEVYGPIKRIHMVYSKRSGKPRGYAFIEYEHERDMHSAYKHADGKKIDGRRVLVDVERGRTVKGWRPGG

SEQ ID NO: 1608 - protein, 65 aa, Homo sapiens
  SITE (60): Xaa equals any of the naturally occurring L-amino acids
  SITE (62): Xaa equals any of the naturally occurring L-amino acids
GPSLSLMFKQSLSMKLGGDRVSCQFLTATSHQWLHSVSLTQHMAQECCHPSVFYSSNPRXWXLRD

SEQ ID NO: 1609 - protein, 213 aa, Homo sapiens
ESQEDKEPKEETPAGGRAAAADPGWGSQPAQQRAARKASKEEGARRGVRGLGVRPLRPLGNREWTAEQTVGLSGVWGNTGNSSQEGYPPYWLPPPAAQLCPPEPSVSLNPSLFFPTSTFWTFPLPFPVFKISVTTPGTFAADLGVLFKRKSGGWESLGELRLRVEGVCPSLGVLVPVRGVYGLFPSPSLIFFFFLKKAKMRINTSRHVKKKKK

SEQ ID NO: 1610 - protein, 916 aa, Homo sapiens
  SITE (365): Xaa equals any of the naturally occurring L-amino acids
  SITE (524): Xaa equals any of the naturally occurring L-amino acids
  SITE (687): Xaa equals any of the naturally occurring L-amino acids
  SITE (806): Xaa equals any of the naturally occurring L-amino acids
RPTRPAGSTDCHGAAAGVRATLVLELLDTDGLVVCARGLGADRLLYHFLQLHCHPACLVLVLNTQPAEEEYFINQLKIEGVEHLPRRVTNEITSNSRYEVYTQGGVIFATSRILVVDFLTDRIPSDLITGILVYRAHRIIESCQEAFILRLFRQKNKRGFIKAFTDNAVAFDTGFCHVERVMRNLFVRKLYLWPRFHVAVNSFLEQHKPEVVEIHVSMTPTMLAIQTAILDILNACLKELKCHNPSLEVEDLSLENAIGKPFDKTIRHYLDPLWHQLGAKTKSLVQDLKILRTLLQYLSQYDCVTFLNLLESLRATEKAFGQNSGWLFLDSSTSMFINARARVYHLPDAKMSKKEKISEKMEIKXGEETKKELVLESNPKWEALTEVLKEIEAENKESEALGGPGQVLICASDDRTCSQLRDYITLGAEAFLLRLYRKTFEKDSKAEEVWMKFRKEDSSKRIRKSHKRPKDPQNKERASTKERTLKKKKRKLTLTQMVGKPEELEEEGDVEEGYRREISSSPEXCPEEIKHEEFDVNLSSDAAFGILKEPLTIIHPLLGCSDPYALTRVLHEVEPRYVVLYDAELTFVRQLEIYRASRPGKPLRVYFLIYGGSTEEQRYLTALRKEKEAFEKLIREKASMVVPEEREGRDETNLDLVRGTASADVSTDTRKAGGQEQNGTQQSIVVXMREFRSELPSLIHRRDIDIEPVTLEVGDYILTPEMCVERKSISDLIGSLNNGRLYSQCISMSRYYKRPVLLIEFDPSKPFSLTSRGALFQEISSNDISSKLTLLTLHFPRLRILWCPSXHATAELFEELKQSKPQPDAATALAITADSETLPESEKYNPGPQDFLLKMPGVNAKNCRSLMHHVKNIAELAALSQDELTSILGNAANAKQLYDFIHTSFAEVVSKGKGKK

SEQ ID NO: 1611 - protein, 197 aa, Homo sapiens
GGGPAPGDIVFCRNQPKDEDADMMKYIETELKKRKGIVEHEEQKVKPKNAEDCLYELPENIRVSSAKKTEEMLSNQMLSGIPEVDLGIDAKIKNIISTEDAKARLLAEQQNKKKDSETSFVPTNMAVNYVQHNRFYHEELNAPIRRNKEEPKARPLRVGDTEKPEPERSPPNRKRPANEKATDDYHYEKFKKMNRRY

SEQ ID NO: 1612 - protein, 476 aa, Homo sapiens
PRVRGDVGMAGVAIDTVEDTKILFDGIPLEKMSVSMTMNGAVIPVLANFIVTGEEQGVPKEKLTGTIQNDILKEFMVRNTYIFPPEPSMKIIADIFEYTAKHMPKFNSISISGYHMQEAGADAILELAYTLADGLEYSRTGLQAGLTIDEFAPRLSFFWGIGMNFYMEIAKMRAGRRLWAHLIEKMFQPKNSKSLLLRAHCQTSGWSLTEQDPYNNIVRTAIEAMAAVFGGTQSLHTNSFDEALGLPTVKSARIARNTQIIIQEESGIPKVADPWGGSYMMECLTNDVYDAALKLINEIEEMGGMAKAVAEGIPKLRIEECAARRQARIDSGSEVIVGVNKYQLEKEDAVEVLAIDNTSVRNRQIEKLKKIKSSRDQALAERCLAALTECAASGDGNILALAVDASRARCTVGEITDALKKVFGEHKANDRMVSGAYRQEFGESKEITSAIKRVHKFMEREGRSSSSCSKNGTRWP

SEQ ID NO: 1613 - protein, 319 aa, Homo sapiens
  SITE (84): Xaa equals any of the naturally occurring L-amino acids
  SITE (85): Xaa equals any of the naturally occurring L-amino acids
  SITE (289): Xaa equals any of the naturally occurring L-amino acids
QHHRAAHLKWIFVGGKGGVGKTTCSCSLAVQLSKGRESVLIISTDPAHNISDAFDQKFSKVPTKVKGYDNLFAMEIDPSLGVAXXPDEFFEEDNMLSMGKKMMQEAMSAFPGIDEAMSYAEVMRLVKGMNFSVVVFDTAPTGHTLRLLNFPTIVERGLGRLMQIKNQISPFISQMCNMLGLGDMNADQLASKLEETLPVIRSVSEQFKDPEQTTFICVCIAEFLSLYETERLIQELAKCKIDTHNIIVNQLVFPDPEKPCKMCEARHKIQAKYLDQMEDLYEDFHIVKXPLLPHEVRGADKVNTFSALLLEPYKPPSAQ

SEQ ID NO: 1614 - protein, 207 aa, Homo sapiens
HEERGQGRFLKMAALKALVSGCGRLLRGLLAGPAATSWSRLPARGFREVVETQEGKTTIIEGRITATPKESPNPPNPSGQCPICRWNLKHKYNYDDVLLLSQFIRPHGGMLPRKITGLCQEEHRKIEECVKMAHRAGLLPNHRPRLPEGVVPKSKPQLNRYLTRWAPGSVKPIYKKGPRWNRVRMPVGSPLLRDNVCYSRTPWKLYH

SEQ ID NO: 1615 - protein, 304 aa, Homo sapiens
  SITE (174): Xaa equals any of the naturally occurring L-amino acids
PTRPRVHLATVSASAAWDALGLPVRSHMQGSTRRMGVMTDVHRRFLQLLMTHGVLEEWDVKRLQTHCYKVHDRNATVDKLEDFINNINSVLESLYIEIKRGVTEDDGRPIYALVNLATTSISKMATDFAENELDLFRKALELIIDSETGFASSTNILNLVDQLKGKKMRKKEAXQVLQKFVQNKWLIEKEGEFTLHGRAILEMEQYIRETYPDAVKICNICHSLLIQGQSCETCGIRMHLPCVAKYFQSNAEPRCPHCNDYWPHEIPKVFDPEKERESGVLKSNKKSCGPGSISHRALLRGWLP

SEQ ID NO: 1616 - protein, 223 aa, Homo sapiens
  SITE (3): Xaa equals any of the naturally occurring L-amino acids
  SITE (9): Xaa equals any of the naturally occurring L-amino acids
  SITE (216): Xaa equals any of the naturally occurring L-amino acids
AEXLGGPGXASGGETSVERRRTCAFDTLEAFLIMDGEDIPDFSSLKEETAYWKELSLKYKQRATIVSLEDFEQRLNQAIERNAFLESELDEKESLLVSVQRLKDEARDLRQELAVRERQQEVTRKSAPSSPTLDCEKMDSAVQASLSLPATPVGKGTENTFPSPKAIPNGFGTSPLTPSARISALNIVGGSLTESRGFRIQISSLQEFCKGPSITXILYFREC

SEQ ID NO: 1617 - protein, 138 aa, Homo sapiens [sequence omitted]

SEQ ID NO: 1618 - protein, 388 aa, Homo sapiens
AESTARVCCPSPRYAQSRRSPAWGEQSDHRPGAARRDARCALCPRAPTAPAAAAEAQRENAPPRGPGAASDPLATCAQPEVSSERRAGGQRGVRGPPPAARARPLMAAIRKKLVVVGDGACGKTCLLIVFSKDEFPEVYVPTVFENYVADIEVDGKQVELALWDTAGQEDYDRLRPLSYPDTDVILMCFSVDSPDSLENIPEKWVPEVKHFCPNVPIILVANKKDLRSDEHVRTELARMKQEPVRTDDGRAMAVRIQAYDYLECSAKTKEGVREVFETATRAAAEALRLPERLHQLLQGAMRAAPVAPAPAGTAPPPGPVPREPGEGETRVPQGPHRPAWHLSADASGLRQDLAWAPGAPIPVSVCVQLCCTGLGSPLSAKGPLSMLF

SEQ ID NO: 1619 - protein, 184 aa, Homo sapiens
VPVRNSRVDPRVRGTRGRTRGREGRSLWRKMAAAWGSSLTAATQRAVTPWPRGRLLTASLGPQARREASSSSPEAGEGQIRLTDSCVQRLLEITEGSEFLRLQVEGGGCSGFQYKFSLDTVINPDDRVFEQGGARVVVDSDSLAFVKGAQVDFSQELIRSSFQVLNNPQAQQGCSCGSSFSIKL

SEQ ID NO: 1620 - protein, 468 aa, Homo sapiens
  SITE (1): Xaa equals any of the naturally occurring L-amino acids
  SITE (4): Xaa equals any of the naturally occurring L-amino acids
XAPXGPPAPPALPPAASPGAPARRPGGRSEEKISDSEGFKANLSLLRRPGEKTYTQRCRLFVGNLPADITEDEFKRLFAKYGEPGEVFINKGKGFGFIKLESRALAEIAKAELDDTPMRGRQLRVRFATHAAALSVRNLSPYVSNELLEEAFSQFGPIERAVVIVDDRGRSTGKGIVEFASKPAARKAFERCSEGVFLLTTTPRPVIVEPLEQLDDEDGLPEKLAQKNPMYQKERETPPRFAQHGTFEYEYSQRWKSLDEMEKQQREQVEKNMKDAKDKLESEMEDAYHEHQANLLRQDLMRRQEELRRMEELHNQEMQKRKEMQLRQEEERRRREEEMMIRQREMEEQMRRQREESYSRMGYMDPRERDMRMGGGGAMNMGDPYGSGGQKFPPLGGGGGIGYEANPGVPPATMSGSMMGSDMRTERFGQGGAGPVGGQGPRGMGPGTPAGYGRGREEYEGPNKKPRF

SEQ ID NO: 1621 - protein, 114 aa, Homo sapiens [sequence omitted]

SEQ ID NO: 1622 - protein, 399 aa, Homo sapiens
  SITE (10): Xaa equals any of the naturally occurring L-amino acids
  SITE (15): Xaa equals any of the naturally occurring L-amino acids
  SITE (397): Xaa equals any of the naturally occurring L-amino acids
EVCHGGHRGXLQSWXPPREAESLQPMTVVGTDYVFHNDTKVVFLSPAVPEEPEAYNLTVLIEMDGHRALLRTEAGAFEYVPDPTFENFTGGVKKQVNKLIHARGTNLNKAMTLQEAEAFVGAERCTMKTLTETDLYCEPPEVQPPPKRRQKRDTTHNLPEFIVKFGSREWVLGRVEYDTRVSDVPLSLILPLVIVPMVVVIAVSVYCYWRKSQQAEREYEKIKSQLEGLEESVRDRCKKEFTDLMIEMEDQTNDVHEAGIPVLDYKTYTDRVFFLPSKDGDKDVMITGKLDIPEPRRPVVEQALYQFSNLLNSKSFLINFIHTLENQREFSARAKVYFASLLTVALHGKLEYYTDIMHTLFLELLEQYVVAKNPKLMLRRSETVVERMLSNWMSILXPI

SEQ ID NO: 1623 - protein, 189 aa, Homo sapiens
  SITE (61): Xaa equals any of the naturally occurring L-amino acids
  SITE (154): Xaa equals any of the naturally occurring L-amino acids
IYDFRTGMRLKKEEKSRQELEKLKRKLEGDASDFHEQIADLQAQIAELKMQLAKKEEELQXALARLDDEILQKNNALKKIRELEGHISDLQEDLDSERAARNKAEKQKRDLGEELEALKTELEDTLDSTATQQELRAKREQEVTVLKKALDEEXRSHEAQVQEMRQKHAQAVEELKQRAGHRAHTGPEE

SEQ ID NO: 1624 - protein, 276 aa, Homo sapiens
LISPVWGNIQRSRSVPLFPSGLVLGGIWARGPLLALLASFNIISVLNAECYLKQILHPTSHFTVSETPPLSGNDTDSLSCDSGSSATSTPCVSRLVTGHHLWASKNGRHVLGLIEDYEALLKQISQGQRLLAEMDIQTQEAPSSTSQELGTKGPHPAPLSKFVSSVSTAKLTLEEAYRRLKLLWRVSLPEDGQCPLHCEQIGEMKAEVTKLHKKLFEQEKKLQNTMKLLQLSKRQEKVIFDQLVVTHKILRKARGNLELRPGGAHPGTCSPSRPGS

SEQ ID NO: 1625 - protein, 133 aa, Homo sapiens
QSAVGNTATTLPWQGPESISGGAAHVCMCCVSEHTRVHTHTHVHTHALSPLRGLEVWLSPWGKVSSFISLLQVGVPGVRCRGHIAGCPLFVAPIKGPHLVDTWLSVWSLPQPVLVTITGLAFVTMMTPACLIF

SEQ ID NO: 1626 - protein, 677 aa, Homo sapiens
  SITE (11): Xaa equals any of the naturally occurring L-amino acids
  SITE (339): Xaa equals any of the naturally occurring L-amino acids
  SITE (538): Xaa equals any of the naturally occurring L-amino acids
  SITE (544): Xaa equals any of the naturally occurring L-amino acids
SSGMALAVAAXAEAQAARPQWRLEPERRRRRHPGEFKMAAGGTGGLREEQRYGLSCGRLGQDNITVLHVKLTETAIRALETYQSHKNLIPFRPSIQFQGLHGLVKIPKNDPLNEVHNFNFYLSNVGKDNPQGSFDCIQQTFSSSGASQLNCLGFIQDKITVCATNDSYQMTRERMTQAEEESRNRSTKVIKPGGPYVGKRVQIRKAPQAVSDTVPERKRSTPMNPANTIRKTHSSSTISQRPYRDRVIHLLALKAYKKPELLARLQKDGVNQKDKNSLGAILQQVANLNSKDLSYTLKDYVFKELQRDWPGYSEIDRRSLESVLSRKLNPSQNATGTSXSESPVCSSRDAVSSPQKRLLDSEFIDPLMNKKARISHLTNRVPPTLNGHLNPTSEKSAAGLPLPPAAAAIPTPPPLPSTYLPISHPPQIVNSNSNSPSTPEGRGTQDLPVDSFSQNDSIYEDQQDKYTSRTSLETLPPGSVLLKCPKPMEENHSMSHKKSKKKSKKHKEKDQIKKHDIETIEEKEEDLKREEEIAKLNXSSPNSXGGVKEDCTASMEPSAIELPDYLIKYIAIVSYEQRQNYKDDFNAEYDEYRALHARMETVARRFIKLDAQRKRLSPGSKEYQNVHEEVLQEYQKIKQSSPNYHEEKYRCEYLHNKLAHIKRLIGEFDQQQAESWS

SEQ ID NO: 1627 - protein, 124 aa, Homo sapiens
  SITE (58): Xaa equals any of the naturally occurring L-amino acids
  SITE (108): Xaa equals any of the naturally occurring L-amino acids
  SITE (123): Xaa equals any of the naturally occurring L-amino acids
GPWGGFELSRLCPYRLPRHTRSVFPLSPPSRAGPSGIEGAGSPRTRAQKSPTGSCIFXRTIPGALRGVSGETGHRQSHGPPPKAQAPPAPPHPSSLTHAASPPPCRCXGQSPVRPKTGLVPGXA

SEQ ID NO: 1628 - protein, 277 aa, Homo sapiens
  SITE (176): Xaa equals any of the naturally occurring L-amino acids
THVVRHAYRSYFTFIGRVAGLAVFHGKLLDGFFIRPFYKMMLGKQITLNDMESVDSEYYNSLKWILENDPTELDLMFCIDEENFGQTYQVDLKPNGSEIMVTNENKREYIDLVIQWRFVNRVQKQMNAFLEGFTELLPIDLIKIFDENELELLMCGLGDVDVNDWRQHSIYKNGYXPNHPVIQWFWKAVLLMDAEKRIRLLQFVTGTSRVPMNGFAELYGSNGPQLFTIEQWGSPEKLPRAHTCFNRLDLPPYETFEDLREKLLMAVENAQGFEGVD

SEQ ID NO: 1629 - protein, 135 aa, Homo sapiens
  SITE (7): Xaa equals any of the naturally occurring L-amino acids
GAVGGRXGGRYAGRHVSRVRALYKRVLQLHRVLPPDLKSLGDQYVKDEFRRHKTVGSDEAQRFLQEWEVYATALLQQANENRQNSTGKACFGTFLPEEKLNDFRDEQIGQLQELMQEATKPNRQFSISESMKPKF

SEQ ID NO: 1630 - protein, 233 aa, Homo sapiens
  SITE (32): Xaa equals any of the naturally occurring L-amino acids
  SITE (33): Xaa equals any of the naturally occurring L-amino acids
  SITE (195): Xaa equals any of the naturally occurring L-amino acids
  SITE (222): Xaa equals any of the naturally occurring L-amino acids
  SITE (223): Xaa equals any of the naturally occurring L-amino acids
  SITE (227): Xaa equals any of the naturally occurring L-amino acids
  SITE (231): Xaa equals any of the naturally occurring L-amino acids
MCPSCSPCGMDWVVETMPQGVCGMSPSVWSVXXETVRGLLLHHPTLPNPYTMAVAARVTAATTVTHITAFDPDSTGQQVWQDLLQDGQLDSPTGQSTPTQKGVGIAGAVCVSSKLRPRGQCRLEFSLAWDMPRIMFGAKGQVHYRRYTRFFGQDGDAAPALSHYALCRYAEWEERISAWQSPVLDDRSLPAWYKXALFNELYFLADGGTVWLEVLEDIQDKXXFYPXRGQXAY

SEQ ID NO: 1631 - protein, 153 aa, Homo sapiens
  SITE (9): Xaa equals any of the naturally occurring L-amino acids
  SITE (118): Xaa equals any of the naturally occurring L-amino acids
WGPRLPPPXKKALLALKKQSSSSTTSQGGVKRSLSEQPVMDTATATEQAKQLVKSGAISAIKAETKNSGFKRSRTLEGKLKDPEKGPVPTFQPFQRSISADDDLQESSRRPQRKSLYXSSLAVQNSPKGCHRDKRTQIVYSDDVYKENLVDGF

SEQ ID NO: 1632 - protein, 224 aa, Homo sapiens
PTRCGASGSRPPSGSDPANGFGYIFMLGFITRPPHRFLSLLCPGLRIPQLSVLCAQPRPRAMAISSSSCELPLVAVCQVTSTPDKQQNFKTCAELVREAARLGACLAFLPEAFDFIARDPAETLHLSEPLGGKLLEEYTQLARECGLWLSLGGFHERGQDWEQTQKIYNCHVLLNSKGAVVATYRKTHLCDVEIPGQGLCVKATLPCLGPVLSHLSAHQQARLV

SEQ ID NO: 1633 - protein, 668 aa, Homo sapiens
TINGVILISVFFSFFFLHPMLSVVVCVVGLSPGQYFYFQEVFPVLAAKHCIMQANAEYHQSILAKQQKKFGEEIARLQHAAELIKTVASRYDEYVNVKDFSDKINRALAAAKKDNDFIYHDRVPDLKDLDPIGKATLVKSTPVNVPISQKFTDLFEKMVPVSVQQSLAAYNQRKADLVNRSIAQMREATTLANGVLASLNLPAAIEDVSGDTVPQSILTKSRSVIEQGGIQTVDQLIKELPELLQRNREILDESLRLLDEEEATDNDLRAKFKERWQRTPSNELYKPLRAEGTNFRTVLDKAVQADGQVKECYQSHRDTIVLLCKPEPELNAAIPSANPAKTMQGSEVVNVLKSLLSNLDEVKKEREGLENDLKSVNFDMTSKFLTALAQDGVINEEALSVTELDRVYGGLTTKVQESLKKQEGLLKNIQVSHQEFSKMKQSNNEANLREEVLKNLATAYDNFVELVANLKEGTKFYNELTEILVRFQNKCSDIVFARKTERDELLKDLQQSIAREPSAPSIPTPAYQSSPAGGHAPTPPTPAPRTMPPTKPQPPARPPPPVLPANRAPSATAPSPVGAGTAAPAPSQTPGSAPPPQAQGPPYPTYPGYPGYCQMPMPMGYNPYAYGQYNMPYPPVYHQSPGQAPYPGPQQPSYPFPQPPQQSYYPQQ

SEQ ID NO: 1634 - protein, 99 aa, Homo sapiens
  SITE (64): Xaa equals any of the naturally occurring L-amino acids
  SITE (75): Xaa equals any of the naturally occurring L-amino acids
  SITE (78): Xaa equals any of the naturally occurring L-amino acids
  SITE (81): Xaa equals any of the naturally occurring L-amino acids
GEAAKMSSEPPPPYPGGPTAPLLEEKSGAPPTPGRSSPAVMQPPPGMPLPPADIGPPPYEPPGXPMPQPGFIPPXMSXDGXYMPPGFLPFFRGPHPPLG

SEQ ID NO: 1635 - protein, 74 aa, Homo sapiens
GEAAFCPSPHSHLIYLIQSQLLKFGKDQIALQFFSLCSILKSWKILWNSSVYRAQVKALSKVYLFIYYPKNALP

SEQ ID NO: 1636 - protein, 67 aa, Homo sapiens
  SITE (48): Xaa equals any of the naturally occurring L-amino acids
RHRSVSTPRAGGIVWFHEGLKSVIPKVGLQAAAPSICVFLSGTVGLYXRLTCFGSRGIILGFGKTHF

SEQ ID NO: 1637 - protein, 64 aa, Homo sapiens
  SITE (21): Xaa equals any of the naturally occurring L-amino acids
TFIYVGLYLTICNFKVMLGQXNVSASRIAIKYHTKFGGRTDLCYKEMEKSSLCHGDEKPASHSN

SEQ ID NO: 1638 - protein, 93 aa, Homo sapiens
  SITE (90): Xaa equals any of the naturally occurring L-amino acids
QRGDSADTASLRFNTPSFDLSCPHYPRKIQSSFQSILINPLDPKFREVPLPSSLLPGPTEEHPTTLHQLLKTHKGKIPTGPCQEVVELPXRFH

SEQ ID NO: 1639 - protein, 222 aa, Homo sapiens
HELNCKDAVSRKRSHSASEKSGTGTSISKRLNMNPQIRNPMKAMYPGTFYFQFKNLWEANDRNETWLCFTVEGIKRRSVVSWKTGVFRNQVDSETHCHAERCFLSWFCDDILSPNTKYQVTWYTSWSPCPDCAGEVAEFLARHSNVNLTIFTARLYYFQYPCYQEGLRSLSQEGVAVEIMDYEDFKYCWENFVYNDNEPFKPWKGLKTNFRLLKRRLRESLQ

SEQ ID NO: 1640 - protein, 436 aa, Homo sapiens
GLKRVSATAAHRNALQNPKQGGTQLKTEKIHMFLLAPVATGINSHNDRGRGIQGTINEQCASSLKIRASHGTKMMTPEVLAEAYGKKEWKHFLSDTGMACRSGKYYFYDNYFDLPGALLCARVVDYLTKLNNGQKTFDFWKDIVAAIQHNYKMSAFKENCGIYFPEIKRDPGRYLHSCPESVKKWLRQLKNAGKILLLITSSHSDYCRLLCEYILGNDFTDLFDIVITNALKPGFFSHLPSQRPFRTLENDEEQEALPSLDKPGWYSQGNAVHLYELLKKMTGKPEPKVVYFGDSMHSDIFPARHYSNWETVLILEELRGDEGTRSQRPEESEPLEKKGKYEGPKAKPLNTSSKKWGSFFIDSVLGLENTEDSLVYTWSCKRISTYSTIAIPSIEAIAELPLDYKFTRFSSSNSKTAGYYPNPPLVLSSDETLISK

SEQ ID NO: 1641 - protein, 81 aa, Homo sapiens
PHSLLFFLLQTLRQCSNTSFTHPPNNSVHSVFFPLSGVSSMLVRLGEHLDLFHRKGCFQPVSVMLVLLQQSKSKGFRSLFD

SEQ ID NO: 1642 - protein, 86 aa, Homo sapiens
  SITE (66): Xaa equals any of the naturally occurring L-amino acids
  SITE (73): Xaa equals any of the naturally occurring L-amino acids
TEKKKKKGGRSRGSKLTYACMRRHSSSIVSPKFNSLAVVLQRRDWENPGVTQLNRLAAHPPFASWXNSEEARXGSPFPHNCALEWA

SEQ ID NO: 1643 - protein, 118 aa, Homo sapiens
HCVEGTSLSLPCLTVSGSFSPCVSWCSQPHQSPCRELTAFTLKARVTWVVRHHLSPCPHLLVWGFSGELTAVSTPLSPHPPRPAWGTHFLLGGASMVRGPASLHTARTALHRPTPYDT

SEQ ID NO: 1644 - protein, 52 aa, Homo sapiens
  SITE (13): Xaa equals any of the naturally occurring L-amino acids
  SITE (16): Xaa equals any of the naturally occurring L-amino acids
  SITE (17): Xaa equals any of the naturally occurring L-amino acids
RLSESLSVSSLQXRSXXVKPLTAVMSEVIPRTWETAVHGWILLTSAEFCQVT

SEQ ID NO: 1645 - protein, 346 aa, Homo sapiens
  SITE (35): Xaa equals any of the naturally occurring L-amino acids
  SITE (83): Xaa equals any of the naturally occurring L-amino acids
PPASTLPWDLMKSRKNFKKWPLTLLPERWLQIWQXGTRSMCAWMIDSFGNEEQRHKFCPPLCTMEKFASYCLTEPGSGSDAAXLLTSAKKQGDHYILNGSKAFISGAGESDIYVVMCRTGGPGPKGISCIVVEKGTPGLSFGKKEKKVGWNSQPTRAVIFEDCAVPVANRIGSEGQGFLIAVRGLNGGRINIASCSLGAAHASVILTRDHLNVRKQFGEPLASNQYLQFTLADMATRLVAARLMVRNAAVALQEERKDAVALCSMAKLFATDECFAICNQALQMHGGYGYLKDYAVQQYVRDSRVHQILEELFWQGPGVQSRSFALFGGPQIPLLLPFSSGDLREG

SEQ ID NO: 1646 - protein, 201 aa, Homo sapiens
  SITE (6): Xaa equals any of the naturally occurring L-amino acids
CNLAKXVISISFLKEEEQEDEEEIDVVSVEKRQAPGKRSESGSPSAGGHSKPPHSPLVLKRCHVSTHQHNYAAPPSTRKDYPAAKRVKLDSVRVLRQISNNRKCTSPRSSDTEENVKRRTHNVLERQRRNELKRSFFALRDQIPELENNEKAPKVVILKKATAYILSVQAEEQKLISEEDLLRKRREQLKHKLEQLRNSCA

SEQ ID NO: 1647 - protein, 84 aa, Homo sapiens
SIYDSSKKNHLLYAGDMFRDLSEKLAWFEGTQYHFNLLKISVFLLFFCCHCQSAIFFTILLKYYCLLYLFNVHILKKSSLYELF

SEQ ID NO: 1648 - protein, 60 aa, Homo sapiens
  SITE (18): Xaa equals any of the naturally occurring L-amino acids
  SITE (26): Xaa equals any of the naturally occurring L-amino acids
  SITE (29): Xaa equals any of the naturally occurring L-amino acids
  SITE (44): Xaa equals any of the naturally occurring L-amino acids
LKINYIKISFFVLVFFLXTLCFKYKXKYXIYFCVLPSELKFPMXLTELGLALGEEWTAAG

SEQ ID NO: 1649 - protein, 390 aa, Homo sapiens
ARGECCRGGLWEKMAAAAQSRVVRVLSMSRSAITAIATSVCHGPPCRQLHHALMPHGKGGRSSVSGIVATVFGATGFLGRYVVNHLGRMGSQVIIPYRCDKYDIMHLRPMGDLGQLLFLEWDARDKDSIRRVVQHSNVVINLIGRDWETKNFDFEDVFVKIPQAIAQLSKEAGVEKFIHVSHLNANIKSSSRYLRNKAVGEKVVRDAFPEAIIVKPSDIFGREDRFLNSFASMHRFGPIPLGSLGWKTVKQPVYVVDVSKGIVNAVKDPDANGKSFAFVGPSRYLLFHLVKYIFAVAHRLFLPFPLPLFAYRWVARVFEISPFEPWITRDKVERMHITDMKLPHLPGLEDLGIQATPLELKAIEVLRRHRTYRWLSAEIEDVKPAKTVNI

SEQ ID NO: 1650 - protein, 99 aa, Homo sapiens
  SITE (25): Xaa equals any of the naturally occurring L-amino acids
  SITE (58): Xaa equals any of the naturally occurring L-amino acids
  SITE (81): Xaa equals any of the naturally occurring L-amino acids
  SITE (92): Xaa equals any of the naturally occurring L-amino acids
GSMGQAQSKPTPPGTMLKNFKKGFXGDYGVTMTPGKLRTLCEIDWPALEVGWPSEGSXDRSLVSKVWHKVTCKPGCPDQFXYIDTWLQLVLXPSYPHGG

SEQ ID NO: 1651 - protein, 153 aa, Homo sapiens
  SITE (86): Xaa equals any of the naturally occurring L-amino acids
AGTGGRRWGNRGSVRLRVRGSDWAEQASHRRVTARRPRSELPGQPPFCWRWERMWAWGWGGAKLRGRAADTLKLRAGRAQRKGRRXHGYPSVRGSSSFFWRAQGAAGVMSPWVLAPTAKFAWPGPPSRGLTRHTDQNPEQAVLSILRLLRLPR

SEQ ID NO: 1652 - protein, 312 aa, Homo sapiens
  SITE (289): Xaa equals any of the naturally occurring L-amino acids
TFIWLILIMNRAFSRKKDKTWMHTPEALSKHFIPYNAKFLGSTEVEQPKGTEVVRDAVRKLKFARHIKKSEGQKIPKVELQISIYGVKILEPKTKEVQHNCQLHRISFCADDKTDKRIFTFICKDSESNKHLCYVFDSEKCAEEITLTIGQAFDLAYRKFLESGGKDVETRKQIAGLQKRIQDLETENMELKNKVQDLENQLRITQVSAPPAGSMTPKSPSTDIFDMIPFSPISHQSSMPTRNGTQPPPVPSRSTEIKRDLFGAEPFDPFNCGAADFPPDIQSKLDEMXEGFKMGLTLEGTVFCLDPLDSRC

SEQ ID NO: 1653 - protein, 50 aa, Homo sapiens [sequence omitted]

SEQ ID NO: 1654 - protein, 117 aa, Homo sapiens
YKNDRSSYERHANETPSSGEALESELSFFLMSSDAASFLIFLKTVCFCGMYICTPNYLALGNHSTTQRQLNKEKFNFKYQVLSNISQTSDFIKGLPANKVHPKYTGEKARLLQGPRV

SEQ ID NO: 1655 - protein, 373 aa, Homo sapiens
  SITE (144): Xaa equals any of the naturally occurring L-amino acids
  SITE (290): Xaa equals any of the naturally occurring L-amino acids
  SITE (325): Xaa equals any of the naturally occurring L-amino acids
  SITE (328): Xaa equals any of the naturally occurring L-amino acids
VMSTAALITLVRSGGNQVRRRVLLSSRLLQDDRRVTPTCHSSTSEPRCSRFDPDGSGSPATWDNFGIWDNRIDEPILLPPSIKYGKPIPKISLENVGCASQIGKRKENEDRFDFAQLTDEVLYFAVYDGHGGPAAADFCHTHMXKCIMDLLPKEKNLETLLTLAFLEIDKAFSSHARLSADATLLTSGTTATVALLRDGIELVVASVGDSRAILCRKGKPMKLTIDHTPERKDEKERIKKCGGFVAWNSLGQPHVNGRLAMTRSIGDLDLKTSGVIAEPETKRIKLHHAXDSFLVLTTDGINFMVNSQEICDFVNQCHDPNEAAXAVXEQAIQYGTEDNSTAVVVPFGAWGKYKNSEINFSFSRSFASSGRWA

SEQ ID NO: 1656 - protein, 82 aa, Homo sapiens [sequence omitted]

SEQ ID NO: 1657 - protein, 273 aa, Homo sapiens
  SITE (30): Xaa equals any of the naturally occurring L-amino acids
VARSSSELPRRLVCSKLRADPGRLTPDACXRPGMSRYLLPLSALGTVAGAAVLLKDYVTGGACPSKATIPGKTVIVTGANTGIGKQTALELARRGGNIILACRDMEKCEAAAKDIRGETLNHHVNARHLDLASLKSIREFAAKIIEEEERVDILINNAGVMRCPHWTTEDGFEMQFGVNHLGHFLLTNLLLDKLKASAPSRIINLSSLAHVAGHIDFDDLNWQTRKYNTKAAYCQSKLAIVLFTKELSRRLQGTGALGSASLLLYSEPRAAFP

SEQ ID NO: 1658 - protein, 240 aa, Homo sapiens
YLCILQASKLEDLRVKLKKEGYSNISYIVVNHQGISSRLKYTHLKNKVSEHIPVYQQEENQTDVWTLLNGSKDDFLIYDRCGRLVYHLGLPFSFLTFPYVEEAIKIAYCEKKCGNCSLTTLKDEDFCKRVSLATVDKTVETPSPHYHHEHHHNHGHQHLGSSELSENQQPGAPNAPTHPAPPGLHHHHKHKGQHRQGHPENRDMPASEDLQDLQKKLCRKRCINQLLCKLPTDSELAPRS

SEQ ID NO: 1659 - protein, 221 aa, Homo sapiens
  SITE (1): Xaa equals any of the naturally occurring L-amino acids
XTRGYGCEKTTEGGSQGPLPALAAGSTFPVLACSSAMAPKGSSKQQSEEDLLLQDFSRNLSAKSSALFFGNAFIVSAIPIWLYWRIWHMDLIQSAVLYSVMTLVSTYLVAFAYKNVKFVLKHKVAQKREDAVSKEVTRKLSEADNRKMSRKEKDERILWKKNEVADYEATTFSIFYNNTLFLVVVIVASFFILKNFNPTVNYILSISASSGLIALLSTGSK

SEQ ID NO: 1660 - protein, 421 aa, Homo sapiens
  SITE (140): Xaa equals any of the naturally occurring L-amino acids
  SITE (164): Xaa equals any of the naturally occurring L-amino acids
  SITE (167): Xaa equals any of the naturally occurring L-amino acids
  SITE (321): Xaa equals any of the naturally occurring L-amino acids
  SITE (383): Xaa equals any of the naturally occurring L-amino acids
  SITE (403): Xaa equals any of the naturally occurring L-amino acids
ELGAGGDGHRGGDGAVRSETAPDSYKVQDKKNASSRPASAISGQNNNHSGNKPDPPPVLRVDDRQRLARERREEREKQLAAREIVWLEREERARQHYEKHLEERKKRLEEQRQKEERRRAAVEEKRRQRLEEDKERHEAXVRRTMERSQKPKQKHNRWSWGGSXHGXPSIHSAARRLQLSPWESSVVNRLLTPTHSFLARSKSTAALSGEAASCSPIIMPYKAAHSRNSMDRPKLFVTPPEGSSRRRIIHGTASYKKERERENVLFLTSGTRRAVSPSNPKARQPARSRLWLPSKSLPHLPGTPRPTSSLPPGSVKAAPAXVRPPSPGNIRPVKREVKVEPEKKDPEKEPQKVANEPSLKGRAPLVKVEEATVEERTPAEPEXGLLLQPWPQLQPRPQLQPRXQLQPRSPPQPWSQPRHPL

SEQ ID NO: 1661 - protein, 468 aa, Homo sapiens
  SITE (2): Xaa equals any of the naturally occurring L-amino acids
RXTTSGTLDFDEVVNDADIILVEFYAPWCGHCKKLAPEYEKAAKELSKRSPPIPLAKVDATAETDLAKRFDVSGYPTLKIFRKGRPYDYNGPREKYGIVDYMIEQSGPPSKEILTLKQVQEFLKDGDDVIIIGVFKGESDPAYQQYQDAANNLREDYKFHHTFSTEIAKFLKVSQGQLVVMQPEKFQSKYEPRSHMMDVQGSTQDSAIKDFVLKYALPLVGHRKVSNDAKRYTRRPLVVVYYSVDFSFDYRAATQFWRSKVLEVAKDFPEYTFAIADEEDYAGEVKDLGLSESGEDVNAAILDESGKKFAMEPEEFDSDTLREFVTAFKKGKLKPVIKSQPVPKNNKGPVKVVVGKTFDSIVMDPKKDVLIEFYAPWCGHCKQLEPVYNSLAKKYKGQKGLVIAKMDATANDVPSDRYKVEGFPTIYFAPSGDKKNPVKFEGGDRDLEHLSKFIEEHATKLSRTKEEL

SEQ ID NO: 1662 - protein, 355 aa, Homo sapiens
  SITE (6): Xaa equals any of the naturally occurring L-amino acids
  SITE (262): Xaa equals any of the naturally occurring L-amino acids
AAGIRXRRGGCKMPLPVQVFNLQGAVEPMQIDVDPQEDPQNAPDVNYVVENPSLDLEQYAASYSGLMRIERLQFIADHCPTLRVEALKMALSFVQRTFNVDMYEEIHRKLSEATRELQNAPDAIPESGVEPPALDTAWVEATRKKALLKLEKLDTDLKNYKGNSIKESIRRGHDDLGDHYLDCGDLSNALKCYSRARDYCTSAKHVINMCLNVIKVSVYLQNWSHVLSYVSKAESTPEIAEQRGERDSQTQAILTKLKCAAXWQSWPPGSTSRLPSASCWLPLITVTSLSCCPPATWPSTVACAPWLPLTGRSCSAMSSPAAPSSCSWSWSHRSETSSSNSTSPSTPHVSRCWTR

SEQ ID NO: 1663 - protein, 74 aa, Homo sapiens [sequence omitted]

SEQ ID NO: 1664 - protein, 485 aa, Homo sapiens
PGSILRETGLGCDAAAGVRMSYPGYPPTGYPPFPGYPPAGQESSFPPSGQYPYPSGFPPMGGGAYPQVPSSGYPGAGGYPAPGGYPAPGGYPGAPQPGGAPSYPGVPPGQGFGVPPGGAGFSGYPQPPSQSYGGGPAQVPLPGGFPGGQMPSQYPGGQPTYPSQPATVTQVTQGTIRPAANFDAIRDAEILRKAMKGFGTDEQAIVDVVANRSNDQRQKIKAAFKTSYGKDLIKDLKSELSGNMEELILALFMPPTYYDAWSLRKAMQGAGTQERVLIEILCTRTNQEIREIVRCYQSEFGRDLEKDIRSDTSGHFERLLVSMCQGNRDENQSINHQMAQEDAQRLYQAGEGRLGTDESCFNMILATRSFPQLRATMEAYSRMANRDLLSSVSREFSGYVESGLKTILQCALNRPAFFAERLYYAMKGAGTDDSTLVRIVVTRSEIDLVQIKQMFAQMYQKTLGTMIAGDTSGDYRRLLLAIVGQ

SEQ ID NO: 1665 - protein, 235 aa, Homo sapiens
RNVIEACLQTGTRFLVYTSSMEVVGPNTKGHPFYRGNEDTPYEAVHRHPYPCSKALAEWLVLEANGRKVRGGLPLVTCALRPTGIYGEGHQIMRDFYRQGLRLGGWLFRAIPASVEHGRVYVGNVAWMHVLAARELEQRAALMGGQVYFCYDGSPYRSYEDFNMEFLGPLRTAAGGRPPIAALLAAGVPGCPQCPAAVAAAATGALRTPAEPLHAGRGQHHLHRQHRQGSAPFRL

SEQ ID NO: 1666 - protein, 292 aa, Homo sapiens
  SITE (85): Xaa equals any of the naturally occurring L-amino acids
AALEGPEEELEGSSEPEEWCPPMPERSHLTEPSSSGGCLVTPSRRETPSPTPSYGQQSTATLTPSPPDPPQPPTDMPHLHQMPRXVPLGPSSPLSVSQPMLGIREARPAGLGAGPAASPHLSPSPAPSTASSAPGRTWQGNGEMTPPLQGPRARFRKKPKALPYRRENSPGDLPPPPLPPPEEEASWALELRAAGSMSSLERERSGERKAVQAVPLAAQRVLHPDEEAWLPYSRPSFLSRGQGTSTCSTAGSNSSRGSSSSRGSRGPGRSRSRSQSRSQSQRPGQKRREEPR

SEQ ID NO: 1667 - protein, 521 aa, Homo sapiens
KWKSGKDVDISLLVSFNKMKKLTTDGKLIARALRSSAVVELDLEGTRIRRKKPLGERPKDEDERTVYVELLPKNVNHSWIERVFGKCGNVVYISIPHYKSTGDPKGFAFVEFETKEQAAKAIEFLNNPPEEAPRKPGIFPKTVKNKPIPALRVVEEKKKKKKKKGRMKKEDNIQAKEENMDTSNTSISKMKRSRPTSEGSDIESTEPQKQCSKKKKKRDRVEASSLPEVRTGKRKRSSSEDAESLAPRSKVKKIIQKDIIKEASEASKENRDIEISTEEEKDTGDLKDSSLLKTKRKHKKKHKERHKMGEEVIPLRVLSKSEWMDLKKEYLALQKASMASLKKTISQIKSESEMETDSGVPQNTGMKNEKTANREECRTQEKVNATGPQFVSGVIVKIISTEPLPGRKQVRDTLAAISEVLYVDLLEGDTECHARFKTPEDAQAVINAYTEINKKHCWKLEILSGDHEQRYWQKILVDRQAKLNQPREKKRGTEKLITKAEKIRLAKTQQASKHIRFSEYD

SEQ ID NO: 1668 - protein, 306 aa, Homo sapiens
FPELSGRRAKAKGVWRAAPGANMPRYAQLVMGPAGSGKSTYCATMVQHCEALNRSVQVVNLDPAAEHFNYSVMADIRELIEVDDVMEDDSLRFGPNGGLVFCMEYFANNFDWLENCLGHVEDDYILFDCPGQIELYTHLPVMKQLVQQLEQWEFRVCGVFLVDSQFMVESFKFISGILAALSAMISLEIPQVNIMTKMDLLSKKAKKEIEKFLDPDMYSLLEDSTSDLRSKKFKKLTKAICGLIDDYSMVRFLPYDQSDEESMNIVLQHIDFAIQYGEDLEFKEPKEREDESSSMFDEYFQECQDE

SEQ ID NO: 1669 - protein, 412 aa, Homo sapiens
ETEDVMELLEEDLTCPICCSLFDDPRVLPCSHNFCKKCLEGILEGSVRNSLWRPAPFKCPTCRKETSATGINSLQVNYSLKGIVEKYNKIKISPKMPVCKGHLGQPLNIFCLTDMQLICGICATRGEHTKHVFCSIEDAYAQERDAFESLFQSFETWRRGDALSRLDTLETSKRKSLQLLTKDSDKVKEFFEKLQHTLDQKKNEILSDFETMKLAVMQAYDPEINKLNTILQEQRMAFNIAEAFKDVSEPIVFLQQMQEFREKIKVIKETPLPPSNLPASPLMKNFDTSQWEDIKLVDVDKLSLPQDTGTFISKIPWSFYKLFLLILLLGLVIVFGPTMFLEWSLFDDLATWKGCLSNFSSYLTKTADFIEQSVFYWEQVTDGFFIFNERFKNFTLVVLNNVAEFVCKYKLL

SEQ ID NO: 1670 - protein, 89 aa, Homo sapiens
PEEALEPEAMAHYPTRLKTRKTYSWVGRPLLDRKLHYQTYREMCVKTEGCSTEIHIQIGQFVLIEGDDDENPYVAKLLELFEDDSDPPP

SEQ ID NO: 1671 - protein, 218 aa, Homo sapiens
DPRVRIEIITDRQSGKKRGFGFVTFDDHDPVDKIVLQKYHTINGHNAEVRKALSRQEMQEVQSSRSGRGGNFGFGDSRGGGGNFGPGPGSNFRGGSDGYGSGRGFGDGYNGYGGGPGGGNFGGSPGYGGGRGGYGGGGPGYGNQGGGYGGGYDNYGGGNYGSGNYNDFGNYNQQPSNYGPMKSGNFGGSRNMGGPYGGGNYGPGGSGGSGGYGGRSRY

SEQ ID NO: 1672 - protein, 575 aa, Homo sapiens
  SITE (186): Xaa equals any of the naturally occurring L-amino acids
  SITE (555): Xaa equals any of the naturally occurring L-amino acids
EELRVREHVTGGICGGSQMMVVLLGATTLVLVAVAPWVLSAAAGGKNLKSPQKVEVDIIDDNFILRWNRSDESVGNVTFSFDYQKTGMDNWIKLSGCQNITSTKCNFSSLKLNVYEEIKLRIRAEKENTSSWYEVDSFTPFRKAQIGPPEVHLEAEDKAIVIHISPGTKDSVMWALDGLSFTYSLXIWKNSSGVEERIENIYSRHKIYKLSPETTYCLKVKAALLTSWKIGVYSPVHCIKTTVENELPPPENIEVSVQNQNYVLKWDYTYANMTFQVQWLHAFLKRNPGNHLYKWKQIPDCENVKTTQCVFPQNVFQKGIYLLRVQASDGNNTSFWSEEIKFDTEIQAFLLPPVFNIRSLSDSFHIYIGAPKQSGNTPVIQDYPLIYEIIFWENTSNAERKIIEKKTDVTVPNLKPLTVYCVKARAHTMDEKLNKSSVFSDAVCEKTKPGNTSKIWLIVGICIALFALPFVIYAAKVFLRCINYVFFPSLKPSSSIDEYFSEQPLKNLLLSTSEEQIEKCFIIENISTIATVEETNQTDEDHKKYSSQTSQDSGXYSNEDESESKTSEELQQDFV

SEQ ID NO: 1673 - protein, 571 aa, Homo sapiens
DAWELSRGGPFERIALQPLIPPASPPVEAQARFAAFSLCLITMSTNENANTPAARLHRFKNKGKDSTEMRRRRIEVNVELRKAKKDDQMLKRRNVSSFPDDATSPLQENRNNQGTVNWSVDDIVKGINSSNVENQLQATQAARKLLSREKQPPIDNIIRAGLIPKFVSFLGRTDCSPIQFESAWALTNIASGTSEQTKAVVDGGAIPAFISLLASPHAHISEQAVWALGNIAGDGSVFRDLVIKYGAVDPLLALLAVPDMSSLACGYLRNLTWTLSNLCRNKNPAPPIDAVEQILPTLVRLLHHDDPEVLADTCWAISYLTDGPNERIGMVVKTGVVPQLVKLLGASELPIVTPALRAIGNIVTGTDEQTQVVIDAGALAVFPSLLTNPKTNIQKEATWTMSNITAGRQDQIQQVVNHGLVPFLVSVLSKADFKTQKEAVWAVTNYTSGGTVEQIVYLVHCGIIEPLMNLLTAKDTKIILVILDAISNIFQAAEKLGETEKLSIMIEECGGLDKIEALQNHENESVYKASLSLIEKYFSVEEEEDQNVVPETTSEGYTFQVQDGAPGTFNF

SEQ ID NO: 1674 - protein, 375 aa, Homo sapiens
  SITE (338): Xaa equals any of the naturally occurring L-amino acids
  SITE (340): Xaa equals any of the naturally occurring L-amino acids
  SITE (356): Xaa equals any of the naturally occurring L-amino acids
  SITE (372): Xaa equals any of the naturally occurring L-amino acids
SEPLGRFLLFRRLHSVPRGSALCAMDGIVPDIAVGTKRGSDELFSTCVTNGPFIMSSNSASAANGNDSKKFKGDSRSAGVPSRVIHIRKLPIDVTEGEVISLGLPFGKVTNLLMLKGKNQAFIEMNTEEAANTMVNYYTSVTPVLRGQPIYIQFSNHKELKTDSSPNQARAQAALQAVNSVQSGNLALAASAAAVDAGMAMAGQSPVLRIIVENLFYPVTLDVLHQIFSKFGTVLKIITFTKNNQFQALLQYADPVSAQHAKLSLDGQNIYNACCTLRIDFSKLTSLNVKYNNDKSRDYTRPDLPSGDSQPSLDQTMAAAFGAPGIISASPYAGAGFXPXFAIPQAAGFPFRTSTXPWPLARTEPRWLLIAXGTA

SEQ ID NO: 1675 - protein, 193 aa, Homo sapiens
  SITE (190): Xaa equals any of the naturally occurring L-amino acids
PRFSVFCSRLRRERRRRWRLRRETARRSERALRLPPPQQRRRRRHRSSPDRSRSLPSPAIRAPLPDLYPFGTMRGGGFGDRDRDRDRGGFGARGGGGLPPKKFGNPGERLRKKKWDLSELPKFEKNFYVEHPEVARLTPYEVDELRRKKEITVRGGDVCPKPVFAFHHANFPQYVMDVLMDSRTLQDNIXGRL

SEQ ID NO: 1676 - protein, 365 aa, Homo sapiens
  SITE (47): Xaa equals any of the naturally occurring L-amino acids
  SITE (220): Xaa equals any of the naturally occurring L-amino acids
HEGMFPPFKVRCSGLDKKAKYILLMDIIAADDCRYKFHNSRWMVAGXADPEMPKRMYIHPDSPATGEQWMSKVVTFHKLKLTNNISDKHGFTLAFPSDHATWQGNYSFGTQTILNSMHKYQPRFHIVRANDILKLPYSTFRTYLFPETEFIAVTAYQNDKITQLKIDNNPFAKGFRDTGNGRREKRKQLTLQSMRVFDERHKKENGTSDESSSEQAAFNXFAQASSPAASTVGTSNLKDLCPSEGESDAEAESKEEHGPEACDAAKISTTTSEEPCRDKGSPAVKAHLFAAERPRDSGRLDKASPDSRHSPATISSSTRGLGAEERRSPVREGTAPAKVEEARALPGKEAFAPLTVQTDAAASLF

SEQ ID NO: 1677 - protein, 668 aa, Homo sapiens
  SITE (70): Xaa equals any of the naturally occurring L-amino acids
  SITE (71): Xaa equals any of the naturally occurring L-amino acids
HMVLRPFLLRRIKADVEKSLPPKKEVKIYVGLSKMQREWYTRILMKDIDILNSAGKMDKMRLLNILMQLXXCCNHPYLFDGAEPGPPYTTDMHLVTNSGKMVVLDKLLPKLKEQGSRVLIFSQMTRVLDILEDYCMWRNYEYCRLDGQTPHDERQDSINAYNEPNSTKFVFMLSTRAGGLGINLATADVVILYDSDWNPQVDLQAMDRAHRIGQTKTVRVFRFITDNTVEERIVERAEMKLRLDSIVIQQGRLVDQNLNKIGKDEMLQMIRHGATHVFASKESEITDEDIDGILERGAKKTAEMNEKLSKMGESSLRNFTMDTESSVYNFEGEDYREKQKIAFTEWIEPPKRERKANYAVDAYFREALRVSEPKAPKAPRPPKQPNVQDFQFFPPRLFELLEKEILFYRKTIGYKVPRNPELPNAAQAQKEEQLKIDEAESLNDEELEEKEKLLTQGFTNWNKRDFNQFIKANEKWGRDDIENIAREVEGKTPEEVIEYSAVFWERCNELQDIEKIMAQIERGEARIQRRISIKKALDTKIGRYKAPFHQLRISYGTNKGKNYTEEEDRFLICMLHKLGFDKENVYDELRQCIRNSPQFRFDWFLKSRTAMELQRRCNTLITLIERENMELEEKEKAEKKKRGPKPSTQKRKMDGAPDGRGRKKKLKL

SEQ ID NO: 1678 - protein, 237 aa, Homo sapiens
  SITE (8): Xaa equals any of the naturally occurring L-amino acids
GRKRPLPXKGWSRAGAMWSAGRGGAAWPVLLGLLLALLVPGGGAAKTGAELVTCGSVLKLLNTHHRVRLHSHDIKYGSGSGQQSVTGVEASDDANSYWRIRGGSEGGCPRGSPVRCGQAVRLTHVLTGKNLHTHHFPSPLSNNQEVSAFGEDGEGDDLDLWTVRCSGQHWEREAAVRFQHVGTSVFLSVTGEQYGSPIRGQHEVHGMPSANTHNTWKAMEGIFIKPSVEPSAGHDEL

SEQ ID NO: 1679 - protein, 168 aa, Homo sapiens
  SITE (101): Xaa equals any of the naturally occurring L-amino acids
  SITE (118): Xaa equals any of the naturally occurring L-amino acids
  SITE (144): Xaa equals any of the naturally occurring L-amino acids
EHYSCFLFQNPTPHPSCDAMSTNICSFKDRCVSILCCKFCKQVLSSRGMKAVLLADTEIDLFSTDIPPTNAVDFTGRCYFTKICKCKLKDIACLKCGNIVXYHVIVPCSSCLLSCNNXHFWMFHSQAVYDINRLDSTGVNVLLXGNLPEIEESTDEDVLNISAEECIR

SEQ ID NO: 1680 - protein, 519 aa, Homo sapiens
  SITE (321): Xaa equals any of the naturally occurring L-amino acids
  SITE (332): Xaa equals any of the naturally occurring L-amino acids
  SITE (333): Xaa equals any of the naturally occurring L-amino acids
  SITE (337): Xaa equals any of the naturally occurring L-amino acids
  SITE (511): Xaa equals any of the naturally occurring L-amino acids
KTERKQEGRSLLFEFVAREALQSGLALGYWLGPMLGTLRAMEGEDVEDDQLLQKLRASRRRFQRRMQRLIEKYNQPFEDTPVVQMATLTYETPQGLRIWGGRLIKERNKGEIQDSSMKPADRTDGSVQAAAWGPELPSHRTVLGADSKSGEVDATSDQEESVAWALAPAVPQSPLKNELRRKYLTQVDILLQGAEYFECAGNRAGRDVRVTPLPSLASPAVPAPGYCSRISGKSPGDPAKPASSPREWDPLHPSSTDMALVPRNDSLSLQETSSSSFLSSQPFEDDDICNVTISDLYAGMLHSMSRLLSTKPSSIISTKTXIMQNWNSRRRXXYKSXMNKTYCKGARRSQRSSKENFIPCSEPVKGTGALRDCKNVLDVSCRKTGLKLEKAFLEVNRPQIHKLDPSWKERKVTPSKYSSLIYFDSSATYNLDEENRFRTLKWLISPVKIVSRPTIRQGHGENRQREIEIRFDQLHREYCLSPRNQPRRMCLPDSWAMNMYRGGPAKSWWPXGLKTRKLS

SEQ ID NO: 1681 - protein, 371 aa, Homo sapiens
VPCYRRVFIVSSSQLGEQLKQLVPASGLTVMDLEAEGTCLRFSPLMTAAVLGTRGEDVDQLVACIESKLPVLCCTLQLREEFKQEVEATAGLLYVDDPNWSGIGVVRYEHANDDKSSLKSDPEGENIHAGLLKKLNELESDLTFKIGPEYKSMKSCLYVGMASDNVDAAELVETIAATAREIEENSRLLENMTEVVRKGIQEAQVELQKASEERLLEEGVLRQIPVVGSVLNWFSPVQALQKGRTFNLTAGSLESTEPIYVYKAQGAGVTLPPTPSGSRTKQRLPGQKPFKRSLRGSDALSETSSVSHIEDLEKVERLSSGPEQITLEASSTEGHPGAPSPQHTDQTEAFQKGVPHPEDDHSQVEGPESLR

SEQ ID NO: 1682 - protein, 238 aa, Homo sapiens
  SITE (2): Xaa equals any of the naturally occurring L-amino acids
  SITE (69): Xaa equals any of the naturally occurring L-amino acids
  SITE (145): Xaa equals any of the naturally occurring L-amino acids
  SITE (215): Xaa equals any of the naturally occurring L-amino acids
  SITE (228): Xaa equals any of the naturally occurring L-amino acids
SXRGTSPSEFYFMFQQVRVKPQDFAAITIPRSRGEARVGAGFRPMLPSQGAPQRPLSTFSPAPKATLIXNSIGSLSKLRPQPLTFSPSWGGPKSLPVPAPPGEMGTTPSAPPQRNRRKSVHRVLAELDDESEPPENPPPVLMEPXKKLRVDKAPLTPTGNRRGRPRKYPVSAPMAPPAVGGGEPCAAPCCCLPQEETVAWVQCDGCDVWFHVACXGCSIQAAREADFXCPGCRAGIQT

SEQ ID NO: 1683 - protein, 66 aa, Homo sapiens
MIATETQSSFFARVFWGFCPKIYPGHSITAVLDVYPKLPHHPSTHSCTFIYLFCSSLGDRVRLRLG

SEQ ID NO: 1684 - protein, 119 aa, Homo sapiens
WPLEFVWPPPREREPGNFSTEKGEAFGLCRVRVSKCPAPAGMEDPQSKEPAGEAVALALLESPRPEGGEEPPRPSPEETQQCKFDGQETKGSKFITSSASDFSDPVYKEIAITNGCINR

SEQ ID NO: 1685 - protein, 91 aa, Homo sapiens
IVFLPEDSYLHVSQGLQFFYKFPYPKFRIHVKYFFGAKVLHSWYLLDWKSVARCCLKLPYCFFILYLALWLLNFLFLFEVSFKFAPMLNYL

SEQ ID NO: 1686 - protein, 141 aa, Homo sapiens
EAVAEVSSLFPRLFQIFVIAVVSLVILPRIVIFRRMACYNCGRGGHIAKDCKEPKREREQCCYNCGKPGHLARDCDHADEQKCYSCGEFGHIQKDCTKVKCYRCGETGHVAINCSKTSEVNCYRCGESGHLARECTIEATA

SEQ ID NO: 1687 - protein, 83 aa, Homo sapiens
FWIPWWRKIKHSGLAANDASVTAGVFMSSRGHSTLPRTLMAPRMISEGDIGGIAQITSSLFLGRGSVASNRHLLQARGHHLHC

SEQ ID NO: 1688 - protein, 153 aa, Homo sapiens
RRHPAVVAEVSPAYFLFPSERAAALAACAAMAKIKARDLRGKKKEELLKQLDDLKVELSQLRVAKVTGGAASKLSKIRVVRKSIARVLTVINQTQKENLRKFYKGKKYKPLDLRPKKTRAMRRRLNKHEENLKTKKQQRKERLYPLRKYAVKA

SEQ ID NO: 1689 - protein, 130 aa, Homo sapiens
GGGDAEMGAAAAEADRTLFVGNLETKVTEELLFELFHQAGPVIKVKIPKDKDGKPKQFAFVNFKHEVSVPYAMNLLNGIKLYGRPIKIQFRSGSSHAPQDVSLSYPQHHVGNSSPTSTSPSAGTKGLWIT

SEQ ID NO: 1690 - protein, 172 aa, Homo sapiens
  SITE (110): Xaa equals any of the naturally occurring L-amino acids
RPSLEVLFTVILTKITYCPPEYQVLGDTSSSCCLQSSYQEARCTGFLWFLQEPPTLSVFWPRSGVNPLVSAFELDTCAFSSVNTALFGGVSSSPQPELLNSKPKLVSAEXRFQDSPVSICGDLQIRQSSFPASGVLAPEPSLRLVLLDVLISDHYPPYASHRPRENRHQNLG

SEQ ID NO: 1691 - protein, 272 aa, Homo sapiens
NSRVHPRRPVTAEKMAVLAPLIALVYSVPRLSRWLAQPYYLLSALLSAAFLLVRKLPPLCHGLPTQREDGNPCDFDWREVEILMFLSAIVMMKNRRSMFLMTCKPPLYMGPEYIKYFNDKTIDEELERDKRVTWIVEFFANWSNDCQSFAPIYADLSLKYNCTGLNFGKVDVGRYTDVSTRYKVSTSPLTKQLPTLILFQGGKEAMRRPQIDKKGRAVSWTFSEENVIREFNLNELYQRAKKLSKAGDNIPEEQPVASTPTTVSDGENKKDK

SEQ ID NO: 1692 - protein, 366 aa, Homo sapiens
  SITE (8): Xaa equals any of the naturally occurring L-amino acids
GKRTGRAXASSGRRGEGGWWRLPRSPSLPAVPTPGTMFPAGPPSHSLLRLPLLQLLLLVVQAVGRGLGRASPAGGPLEDVVIERYHIPRACPREVQMGDFVRYHYNGTFEDGKKFDSSYDRNTLVAIVVGVGRLITGMDRGLMGMCVNERRRLIVPPHLGYGSIGLAGLIPPDATLYFDVVLLDVWNKEDTVQVSTLLRPPHCPRMVQDGDFVRYHYNGTLLDGTSFDTSYSKGGTYDTYVGSGWLIKGMDQGLLGMCPGERRKIIIPPFLAYGEKGYGEGGQGHKGKFRRRGKNQASTYSCSGCILHEGIQPRTQGGMKSTLGATKKGCFGRAWWLTLVIPALWEAKAGGSRGQEIETTVKPRLY

SEQ ID NO: 1693 - protein, 361 aa, Homo sapiens
LPQSRWNKSSTPDGVPTLCCRNEARQQISISRMWGLKVLLLPVVSFALYPEEILDTHWELWKKTHRKQYNNKVDEISRRLIWEKNLKYISIHNLEASLGVHTYELAMNHLGDMTSEEVVQKMTGLKVPLSHSRSNDTLYIPEWEGRAPDSVDYRKKGYVTPVKNQGQCGSCWAFSSVGALEGQLKKKTGKLLNLSPQNLVDCVSENDGCGGGYMTNAFQYVQKNRGIDSEDAYPYVGQEESCMYNPTGKAAKCRGYREIPEGNEKALKRAVARVGPVSVAIDASLTSFQFYSKGVYYDESCNSDNLNHAVLAVGYGIQKGNKHWIIKNSWGENWGNKGYILMARNKNNACGIANLASFPKM

SEQ ID NO: 1694 - protein, 282 aa, Homo sapiens
  SITE (20): Xaa equals any of the naturally occurring L-amino acids
PRVRRGPRVSSMASADSRRXADGGGAGGTFQPYLDTLRQELQQTDPTLLSVVVAVLAVLLTLVFWKLIRSRRSSQRAVLLVGLCDSGKTLLFVRLLTGLYRDTQTSITDSCAVYRVNNNRGNSLTLIDLPGHESLRLQFLERFKSSARAIVFVVDSAAFQREVKDVAEFLYQVLIDSMGLKNTPSFLIACNKQDIAMAKSAKLIQQQLEKELNTLRVTRSAAPSTLDSSSTAPAQLGKKGKEFEFSQLPLKVEFLECSAKGGRGDVGSADIQDLEKWLAKIA

SEQ ID NO: 1695 - protein, 232 aa, Homo sapiens
  SITE (113): Xaa equals any of the naturally occurring L-amino acids
GVDTSPFAKSLGHSRGEADLFDSGDIFSTGTGSQSVERTKPKAKIAENPANPPVGGKAKSPMFPALGEASSDDDLFQSAKPKPAKKTNPFPLLEDEDDLFTDQKVKKNETKSXSQQDVILTTQDIFEDDIFATEAIKPSQKTREKEKTLESNLFDDNIDIFADLTVKPKEKSKKKVEAKSIFDDDMDDIFSSGIQAKTTKPKSRSAQAAPEPRFEHKVSNIFDDPLNAFGGQ

SEQ ID NO: 1696 - protein, 123 aa, Homo sapiens
RGGSPEVSGNGAALFEMFSYLILCPSRGSSLICLAWPCVPPVPCSTAYLVPQVLLATPAVTLNSFNSALNAPASEACPISFFLASVFFFSFFFPCFCRRLRGESFLWLPLLRLELEENLIFCI

SEQ ID NO: 1697 - protein, 272 aa, Homo sapiens
  SITE (256): Xaa equals any of the naturally occurring L-amino acids
  SITE (258): Xaa equals any of the naturally occurring L-amino acids
  SITE (262): Xaa equals any of the naturally occurring L-amino acids
  SITE (263): Xaa equals any of the naturally occurring L-amino acids
  SITE (267): Xaa equals any of the naturally occurring L-amino acids
PAPAAHVAGNPGGDAAPAATGTAAAASLATAAGSEDAEKKVLATKVLGTVKWFNVRNGYGFINRNDTKEDVFVHQTAIKKNNPRKYLRSVGDGETVEFDVVEGEKGAEAANVTGPDGVPVEGSRYAADRRRYRRGYYGRRRGPPRNAGEIGEMKDGVPEGAQLQGPVHRNPTYRPRYRSRGPPRPRPAPAVGEAEDKENQQATSGPNQPSVRRGYRRPYNYRRRPRPPNAPSQDGKEAKAGEAPTENPAPPTSRAXLXNTRXXRHLXHRQVT

SEQ ID NO: 1698 - protein, 88 aa, Homo sapiens
RETACCGRDARGAAPAAMAVTALAARTWLGVWGVRTMQARGFGSDQSENVDRGAGSIREAGGAFGKREQAEEERYFRHYRLCFEISLG

SEQ ID NO: 1699 - protein, 223 aa, Homo sapiens
CCSEQQRISKDLANICKTAATAGIIGWVYGGIPAFIHAKQQYIEQSQAEIYHNRFDAVQSAHRAATRGFIRYGWRWGWRTAVFVTIFNTVNTSLNVYRNKDALSHFVIAGAVTGSLFRINVGLRGLVAGGIIGALLGTPVGGLLMAFQKYSGETVQERKQKDRKALHELKLEEWKGRLQVTEHLPEKIESSLQEDEPENDAKKIEALLNLPRNPSVIDKQDKD

SEQ ID NO: 1700 - protein, 543 aa, Homo sapiens
  SITE (264): Xaa equals any of the naturally occurring L-amino acids
  SITE (269): Xaa equals any of the naturally occurring L-amino acids
  SITE (279): Xaa equals any of the naturally occurring L-amino acids
ARARLTCPRRRGPWEAGSRATVSLTRLALGVPGPREHPGQPEDSPEAEASTLDVFTERLPPSGRITKTESLVIPSTRSEGKQAGRRGRSTSLKERQAARPQNERANSLDNERCPDARSQLQIPRKTVYDQLNHILISDDQLPENIILVNTSDWQGQFLSDVLQRHTLPVVCTCSPADVQAAFSTIVSRIQRYCNCNSQPPTPVKIAVAGAQHYLSAILRLFVEQLSHKTPDWLGYMRFLVIPLGSHPVARYLGSVDYRYNNFFXDLAWXDLFNKLEAQXAVQDTPDIVSRITQYIAGANCAHQLPIAEAMLTYKQKSPDEESSQKFIPFVGVVKVGIVEPSSATSGDSDDAAPSGSGTLSSTPPSASPAAKEASPTPPSSPSVSGGLSSPSQGVGAELMGLQVDYWTAAQPADRKRDAEKKDLPVTKNTLKCTFRSLQVSRLPSSGEAAATPTMSMTVVTKEKNKKVMFLPKKAKDKDVESKSQCIEGISRLICTARQQQNMLRVLIDGVECSDVKFFQLAAQWSSHVKHFPICIFGHSKATF

SEQ ID NO: 1701 - protein, 71 aa, Homo sapiens
IPSYTIKCSIGRQSVSFFFYVYCLCGVKYKALGCITYSKAVTLSLICCDPLKMCWGLFCCHCLCCWNLALS

SEQ ID NO: 1702 - protein, 131 aa, Homo sapiens
  SITE (79): Xaa equals any of the naturally occurring L-amino acids
EHVFGFLFCVSLLRIMASSSDGISLSYRPVVTGQDRMMDTEVLSLLSSVALPSLLLASESFDSIYPGIFCVLMFSSGLXSAVLIGRALSFQAILKGGQSKGQSLNPFCGLNNLRIKSSVLLIPVLLCQTLS

SEQ ID NO: 1703 - protein, 330 aa, Homo sapiens
HGNPDRRPRGEEEGDPVGPATLSARLGASAGAMTSLTQRSSGLVQRRTEASRNAADKERAAGGGAGSSEDDAQSRRDEQDDDDKGDSKETRLTLMEEVLLLGLKDREGYTSFWNDCISSGLRGCMLIELALRGRLQLEACGMRRKSLLTRKVICKSDAPTGDVLLDEALKHVKETQPPETVQNWIELLSGETWNPLKLHYQLRNVRERLAKNLVEKGVLTTEKQNFLLFDMTTHPLTNNNIKQRLIKKVQEAVLDKWVNDPHRMDRRLLALIYLAHASDVLENAFAPLLDEQYDLATKRVRQLLDLDPEVECLKANTNEVLWAVVAAFTK

SEQ ID NO: 1704 - protein, 86 aa, Homo sapiens
VFISIVSLRHGKGRMLKQVMFVFSGMGPRSHCWGLPLHVAPLCRPPGRLFPPSPTEAPRGLNRNLANQRHFFCPSIFHTCPTVLFF

SEQ ID NO: 1705 - protein, 17 aa, Homo sapiens
FGGEEMADSVKTFLQDL

SEQ ID NO: 1706 - protein, 471 aa, Homo sapiens
  SITE (37): Xaa equals any of the naturally occurring L-amino acids
  SITE (41): Xaa equals any of the naturally occurring L-amino acids
  SITE (48): Xaa equals any of the naturally occurring L-amino acids
  SITE (191): Xaa equals any of the naturally occurring L-amino acids
  SITE (373): Xaa equals any of the naturally occurring L-amino acids
  SITE (446): Xaa equals any of the naturally occurring L-amino acids
STPSGYLELPDLGQPYSSAVYSLEEQYLGLALDVDRXKKDXEEEEDQXPPCPRLSRELLEVVEPEVLQDSLDRCYSTPSSCLEQPDSCQPYGSSFYALEEKHVGFSLDVGEIEKKGKGKKRRGRRSKKERRRGRKEGEEDQNPPCPRLSRELLDEKGPEVLQDSLDRCYSTPSGCLELTDSCQPYRSAFYXLEQQRVGLAVDMDEIEKYQEVEEDQDPSCPRLSRELLDEKEPEVLQDSLDRCYSTPSGYLELPDLGQPYSSAVYSLEEQYLGLALDVDRIKKDQEEEEDQGPPCPRLSRELLEVVEPEVLQDSLDRCYSTPSSCLEQPDSCQPYGSSFYALEEKHVGFSLDVGEIEKKGKGKKRRGRRSKKXRRRGRKEGEEDQNPPCPRLNGVLMEVEEPEVLQDSLDRCYSTPSMYFELPDSFQHYRSVFYSFEEQHISFALXVDNRFFTLTVTSLHLVFQMGVIFPQ

SEQ ID NO: 1707 - protein, 250 aa, Homo sapiens
RERNLGAPGSGLKAARQSRAVLAPARGAAAPGVAMTSELDIFVGNTTLIDEDVYRLWLDGYSVTDAVALRVRSGILEQTGATAAVLQSDTMDHYRTFHMLERLLHAPPKLLHQLIFQIPPSRQALLIERYYAFDEAFVREVLGKKLSKGTKKDLDDISTKTGITLKSCRRQFDNFKRVFKVVEEMRGSLVDNIQQHFLLSDRLARDYAAIVFFANNRFETGKKKLQYLSFGDFAFCAELMIQNWTLWSRR

SEQ ID NO: 1708 - protein, 337 aa, Homo sapiens
  SITE (112): Xaa equals any of the naturally occurring L-amino acids
  SITE (127): Xaa equals any of the naturally occurring L-amino acids
  SITE (283): Xaa equals any of the naturally occurring L-amino acids
IYHPAVVESTICSGIYTQCQFDIMLGGTDCRTFLTSHINLKKTLCDVILMVQERKIPAHRVVLAAASHFFNLMFTTNMLESKSFEVELKDAEPDIIEQLVEFAYTARISVNXNNVQSLLDAANQYQXEPVKKMCVDFLKEQVDASNCLGISVLAECLDCPELKATADDFIHQHFTEVYKTDEFLQLDVKRVTHLLNQDTLTVRAEDQVYDAAVRWLKYDEPNRQPFMVDILAKVRFPLISKNFLSKTVQAEPLIQDNPECLKMVISGMRYHLLSPEDREELVXGTRPRRKKHDYRIALFGGSQPQSCRYFNPKDYSWTDIRCPFEKREMQHACFGTM

SEQ ID NO: 1709 - protein, 101 aa, Homo sapiens
VASGHPRPDITWMKDDQALTRPEAAEPRKKKWTLSLKNLRPEDSGKYTCRVSNRAGAINATYKVDVIQRTRSKPVLTGTHPVNTTVDFGGTTSFQCKVRTT

SEQ ID NO: 1710 - protein, 124 aa, Homo sapiens
KLELHRGGGRSRTSGSPGLQEFGTRNLRKMVAMAAGPSGCLVPAFGLRLLLATVLQAVSAFGAEFSSEACRELGFSSNLLCSSCDLLGQFNLLQLDPDCRGCCQEEAQFETKKLYAGAILEVCG

SEQ ID NO: 1711 - protein, 98 aa, Homo sapiens
GHASFRAFSFPPSISNLGMFGIDEFTAVINPPQACILAVGRFRPVLKLTEDEEGNAKLQQRQLITVTMSSDSRVVDDELATRFLKSFKANLENPIRLA

SEQ ID NO: 1712 - protein, 100 aa, Homo sapiens
  SITE (19): Xaa equals any of the naturally occurring L-amino acids
GIKGPWTESCLGGPSGMGXGHTSLAISQQDQSKLYHLPPPTVGPHSIASPPEDRTVKDSTPSSLDSDPLMAMLLKLQEAANYIESPDRETILDPNLQATL

SEQ ID NO: 1713 - protein, 66 aa, Homo sapiens
PIFIEYFLHVQLHPLCKDYMNIAHSLLVSQTHLYIFLSEAHCTCIEARIESRKIKPHSPTAKCAFP

SEQ ID NO: 1714 - protein, 107 aa, Homo sapiens
  SITE (3): Xaa equals any of the naturally occurring L-amino acids
GTXTFPGPPNNSSIHGGSKRSENSYCRDLRGQLRAICCSSYSHDRHTTEERGSRGRRVWRIRRLHTSGLPCCCHSGPHPRRLPDILRLVTSTKTDHTNTTEGTLDYL

SEQ ID NO: 1715 - protein, 491 aa, Homo sapiens
  SITE (42): Xaa equals any of the naturally occurring L-amino acids
  SITE (43): Xaa equals any of the naturally occurring L-amino acids
  SITE (44): Xaa equals any of the naturally occurring L-amino acids
AARVGRHGRRRRSAAMAGRGGSALLALCGALAACGWLLGAEXXXPGAPAAGMRRRRRLQQEDGISFEYHRYPELREALVSVWLQCTAISRIYTVGRSFEGRELLVIELSDNPGVHEPGEPEFKYIGNMHGNEAVGRELLIFLAQYLCNEYQKGNETIVNLIHSTRIHIMPSLNPDGFEKAASQPGELKDWFVGRSNAQGIDLNRNFPDLDRIVYVNEKEGGPNNHLLKNMKKIVDQNTKLAPETKAVIHWIMDIPFVLSANLHGGDLVANYPYDETRSGSAHEYSSSPDDAIFQSLARAYSSFNPAMSDPNRPPCRKNDDDSSFVDGTTNGGAWYSVPGGMQDFNYLSSNCFEITVELSCEKFPPEETLKTYWEDNKNSLISYLEQIHRGVKGFVRDLQGNPIANATISVEGIDHDVTSAKDGDYWRLLIPGNYKLTASAPGYLAITKKVAVPYSPAAGVDFELESFSERKEEEKEELMEWWKMMSETLNF

SEQ ID NO: 1716 - protein, 179 aa, Homo sapiens
AAEETGGAQPEGRGVGPKERELQHAALGGTAIQPCFFQDISMEIPQEFQKTVSTMYYLWMCSTLALLLNFLACLASFCVETNNGAGFGLSILWVLLFTPCSFVCWYRPMYKAFRSDSSFNFFVFFFIFFVQDVLFVLQAIGIPGWGFSGWISALVVPKATQQYPCSCCWSPCSSLALLC

SEQ ID NO: 1717 - protein, 499 aa, Homo sapiens
  SITE (11): Xaa equals any of the naturally occurring L-amino acids
  SITE (485): Xaa equals any of the naturally occurring L-amino acids
  SITE (486): Xaa equals any of the naturally occurring L-amino acids
RPVRNSRVTTXPPAQQTRRDQSVPVGSMATKCGNCGPGYSTPLEAMKGPREEIVYLPCIYRNTGTEAPDYLATVDVDPKSPQYCQVIHRLPMPNLKDELHHSGWNTCSSCFGDSTKSRTKLVLPSLISSRIYVVDVGSEPRAPKLHKVIEPKDIHAKCELAFLHTSHCLASGEVMISSLGDVKGNGKGGFVLLDGETFEVKGTWERPGGAAPLGYDFWYQPRHNVMISTEWAAPNVLRDGFNPADVEAGLYGSHLYVWDWQRHEIVQTLSLKDGLIPLEIRFLHNPDAAQGFVGCALSSTIQRFYKNEGGTWSVEKVIQVPPKKVKGWLLPEMPGLITDILLSLDDRFLYFSNWLHGDLRQYDISDPQRPRLTGQLFLGGSIVKGGPVQVLEDEELKSQPEPLVVKGKRVAGGPQMIQLSLDGKRLYITTSLYSAWDKQFYPDLIREGSVMLQVDVDTVKGGLKLNPNFLVDFGKEPLGPALAHXXRYPGGDCSSDIWI

SEQ ID NO: 1718 - protein, 213 aa, Homo sapiens
FIMDNLSSEEIQQRAHQITDESLESTRRILGLAIESQDAGIKTITMLDEQKEQLNRIEEGLDQINKDMRETEKTLTELNKCCGLCVCPCNRTKNFESGKAYKTTWGDGGENSPCNVVSKQPGPVTNGQLQQPTTGAASGGYIKRITNDAREDEMEENLTQVGSILGNLKDMALNIGNEIDAQNPQIKRITDKADTNRDRIDIANARAKKLIDS

SEQ ID NO: 1719 - protein, 102 aa, Homo sapiens
GMEGTEMGARPGGHPQKWSFLWSLALWLPLALSVSLFLGLSLSPPQPGLSLWCTLSYCCEQWKFKGTPSPALLNLGTQPKKDKKLEDSIATQLRELPEKNSN

SEQ ID NO: 1720 - protein, 20 aa, Homo sapiens
AQWLTPVILAFWKAEAGGSL

SEQ ID NO: 1721 - protein, 50 aa, Homo sapiens
  SITE (40): Xaa equals any of the naturally occurring L-amino acids
IRHEVLIVPLLVGLRQEDHLSPGGRGYSEPRVHYCTPARXRERDPVSINK

SEQ ID NO: 1722 - protein, 56 aa, Homo sapiens
  SITE (2): Xaa equals any of the naturally occurring L-amino acids
EXGTESHYVTQAGVQWHDLSSLQPSPPGFKRFSCLRLLSSWDYRHTPPRPANFLYF

SEQ ID NO: 1723 - protein, 111 aa, Homo sapiens
  SITE (9): Xaa equals any of the naturally occurring L-amino acids
  SITE (10): Xaa equals any of the naturally occurring L-amino acids
  SITE (11): Xaa equals any of the naturally occurring L-amino acids
  SITE (50): Xaa equals any of the naturally occurring L-amino acids
  SITE (67): Xaa equals any of the naturally occurring L-amino acids
  SITE (110): Xaa equals any of the naturally occurring L-amino acids
GSTHASAMXXXTSGVGDEWWPKQGDSKGRSGGRPWRTAARSGLTGASSRXRWTTAPRWISAYPSVRXAKEGRLQEVIETLLSLEKQTRTASDMVSTSRILVASSGRCANXG

SEQ ID NO: 1724 - protein, 75 aa, Homo sapiens
  SITE (7): Xaa equals any of the naturally occurring L-amino acids
  SITE (70): Xaa equals any of the naturally occurring L-amino acids
GRGRCEXGKMAAAAVVEFQRAQSLLSTDREASIDILHSIVKRDIQENDEEAVQVKEQSILELGSLLAKTXQAAEL

SEQ ID NO: 1725 - protein, 63 aa, Homo sapiens
  SITE (59): Xaa equals any of the naturally occurring L-amino acids
PGSRHHRARDRLIHFGAVSTDVLGCSAHCSLTQSPKMNIQEQGFPLDLGASFTEDAPPXPSAW

SEQ ID NO: 1726 - protein, 170 aa, Homo sapiens
  SITE (11): Xaa equals any of the naturally occurring L-amino acids
  SITE (60): Xaa equals any of the naturally occurring L-amino acids
  SITE (89): Xaa equals any of the naturally occurring L-amino acids
  SITE (102): Xaa equals any of the naturally occurring L-amino acids
  SITE (103): Xaa equals any of the naturally occurring L-amino acids
  SITE (106): Xaa equals any of the naturally occurring L-amino acids
  SITE (113): Xaa equals any of the naturally occurring L-amino acids
  SITE (115): Xaa equals any of the naturally occurring L-amino acids
  SITE (116): Xaa equals any of the naturally occurring L-amino acids
  SITE (118): Xaa equals any of the naturally occurring L-amino acids
  SITE (128): Xaa equals any of the naturally occurring L-amino acids
  SITE (140): Xaa equals any of the naturally occurring L-amino acids
  SITE (153): Xaa equals any of the naturally occurring L-amino acids
  SITE (156): Xaa equals any of the naturally occurring L-amino acids
  SITE (162): Xaa equals any of the naturally occurring L-amino acids
  SITE (169): Xaa equals any of the naturally occurring L-amino acids
AEPDGSHPVVXAPYNGGPAGTCPKIKQEAVSSCTHLGAGPPLQQWPPAGCHTDFPLGTAXPQQDLPRTLGLEGSAEQQGTVHPALPVSXRVSIPTRGPNLPXXFLXPIQMQPXVXXRXINQGVYANRXLDAKGGPSQRGXRRLWAPEKDRQPXFDXGVWEKXSKKGFSXF

SEQ ID NO: 1727 - protein, 98 aa, Homo sapiens
  SITE (83): Xaa equals any of the naturally occurring L-amino acids
  SITE (97): Xaa equals any of the naturally occurring L-amino acids
  SITE (98): Xaa equals any of the naturally occurring L-amino acids
LRARGAAWAGGLLHRAAPCSLLPRLRTWTSSSNRSREDSWLKSLFVRKVDPRKDAHSNLLSKKETSNLYKLQFHNVKPECLEXYNKICQEVLPKIHXX

SEQ ID NO: 1728 - protein, 125 aa, Homo sapiens
  SITE (118): Xaa equals any of the naturally occurring L-amino acids
GSLFPRVLPSPLGPPGGKHGVCPGAVREQCPTALSSRFVKFSMPSVPDFETLFSQVQLFISTCNGEHIRYATDTFAGLCHQLTNALVERKQPLRGIGILKQAIDKMQMNTNQLTSIHXDLCQLVC

SEQ ID NO: 1729 - protein, 55 aa, Homo sapiens
  SITE (52): Xaa equals any of the naturally occurring L-amino acids
ILTMREIVHIQAGQCGNQIGAKFWEVISDEHGHRPHRAPTTGDSDLPAGTAXSVY

SEQ ID NO: 1730 - protein, 128 aa, Homo sapiens
RIAASETRVAPSVLRLAMTSYSYRQSSATSSFGGLGGGSVRFGPGVAFRAPSIHGGSGGRGVSVSSARFVSSSSSGGYGGGYGGVLTASDGLLAGNEKLTMQNLNDRLASYLDKVRALEAANGELEVK

SEQ ID NO: 1731 - protein, 156 aa, Homo sapiens
  SITE (38): Xaa equals any of the naturally occurring L-amino acids
  SITE (134): Xaa equals any of the naturally occurring L-amino acids
  SITE (143): Xaa equals any of the naturally occurring L-amino acids
STHASAHASEWSEEQLIAAKFCFAGLLIGQTEVDIMSXATQAIFEILEKSWLPQNCTLVDMKIEFGVDVTTKEIVLADVIDNDSWRLWPSGDRSQQKDKQSYRDLKEVTPEGLQMVKRNFEWVAERVELLLKSXSQCRVVVLXGSTSDLGHCEKIQ

SEQ ID NO: 1732 - protein, 101 aa, Homo sapiens
  SITE (29): Xaa equals any of the naturally occurring L-amino acids
  SITE (68): Xaa equals any of the naturally occurring L-amino acids
  SITE (69): Xaa equals any of the naturally occurring L-amino acids
  SITE (78): Xaa equals any of the naturally occurring L-amino acids
  SITE (80): Xaa equals any of the naturally occurring L-amino acids
  SITE (91): Xaa equals any of the naturally occurring L-amino acids
  SITE (93): Xaa equals any of the naturally occurring L-amino acids
  SITE (94): Xaa equals any of the naturally occurring L-amino acids
VDIRKDLYANTVLSGGTTMYPGIADRMQXEITALAPSTMKIKIIAPPERKYSVWIGGSILASLSTFQXXWITSRSTTXRXPPSSTANASNXLXXAYHCCMG

SEQ ID NO: 1733 - protein, 101 aa, Homo sapiens
  SITE (57): Xaa equals any of the naturally occurring L-amino acids
  SITE (101): Xaa equals any of the naturally occurring L-amino acids
ARRRQKGPAAPESKPVPAQSRPAAVCLLFQHDRCRCVLRQGLPGRWSGRSHLKTAVXPSSGSSCCCSCNASKQITADKQCKGIIDCVVRIPKEQDSVLLAX

SEQ ID NO: 1734 - protein, 152 aa, Homo sapiens
  SITE (101): Xaa equals any of the naturally occurring L-amino acids
  SITE (126): Xaa equals any of the naturally occurring L-amino acids
  SITE (133): Xaa equals any of the naturally occurring L-amino acids
  SITE (142): Xaa equals any of the naturally occurring L-amino acids
  SITE (145): Xaa equals any of the naturally occurring L-amino acids
  SITE (148): Xaa equals any of the naturally occurring L-amino acids
ARVHLELQEARVMLVPLVNVDLLDWQGPQDLEVELVPLVPKEERVLLVLLGHLVLLVLLVCKECLEKEEVLEVLVQRVTRVNQAVQVLMVSQGKMAQGVLXVLLVLLAQLASLEIKGEGGAPGFPXISWTCGXPGERGEMAXQDXWFXWCSW

SEQ ID NO: 1735 - protein, 26 aa, Homo sapiens
VRARVPSPAAAMGCTLSAEDKAAVER

SEQ ID NO: 1736 - protein, 95 aa, Homo sapiens
HEVSAASLVPAVPQPEADNLTLRYRSLVYQLNFDQTLRNVDKAGTWAPRELVLVVQVHNRPEYLRLLLDSLRKAQGIDNVLVIFSHDSGRPRSIS

SEQ ID NO: 1737 - protein, 77 aa, Homo sapiens
  SITE (77): Xaa equals any of the naturally occurring L-amino acids
IASGRSRGSKLTYACMRRHSSSIESPKFNSLAVVLQRRDWENPGVTQLNRLAAHPPFASWRNSEEARTDRPSQQLRX

SEQ ID NO: 1738 - protein, 55 aa, Homo sapiens
  SITE (3): Xaa equals any of the naturally occurring L-amino acids
  SITE (7): Xaa equals any of the naturally occurring L-amino acids
  SITE (9): Xaa equals any of the naturally occurring L-amino acids
  SITE (14): Xaa equals any of the naturally occurring L-amino acids
  SITE (54): Xaa equals any of the naturally occurring L-amino acids
  SITE (55): Xaa equals any of the naturally occurring L-amino acids
LIXHIGXGXCSTVXIPGSRDPSLRTAHARHSSSIVSPKFNSLAVVLQRRDWENXX

SEQ ID NO: 1739 - protein, 37 aa, Homo sapiens
  SITE (8): Xaa equals any of the naturally occurring L-amino acids
  SITE (34): Xaa equals any of the naturally occurring L-amino acids
  SITE (37): Xaa equals any of the naturally occurring L-amino acids
SRGSKLTXACMRRHSSSIVSAKFNSLAVVLQRRXWEX

SEQ ID NO: 1740 - protein, 110 aa, Homo sapiens
LTETRFKTGTTLKYTCLPGYVRSHSTQTLTCNSDGEWVYNTFCIYKRCRHPGELRNGQVEIKTDLSFGSQIEFSCSEGFFLIGSTTSRCEVQDRGVGWSHPLPQCEIVQV

SEQ ID NO: 1741 - protein, 49 aa, Homo sapiens
  SITE (12): Xaa equals any of the naturally occurring L-amino acids
  SITE (21): Xaa equals any of the naturally occurring L-amino acids
  SITE (37): Xaa equals any of the naturally occurring L-amino acids
  SITE (40): Xaa equals any of the naturally occurring L-amino acids
QVHLDQVEVASXLTLCKEGCXAIVDTGTSLMVGPVDXVRXCRRPSGPCR

SEQ ID NO: 1742 - protein, 90 aa, Homo sapiens
  SITE (6): Xaa equals any of the naturally occurring L-amino acids
  SITE (7): Xaa equals any of the naturally occurring L-amino acids
  SITE (60): Xaa equals any of the naturally occurring L-amino acids
  SITE (64): Xaa equals any of the naturally occurring L-amino acids
  SITE (72): Xaa equals any of the naturally occurring L-amino acids
  SITE (78): Xaa equals any of the naturally occurring L-amino acids
  SITE (85): Xaa equals any of the naturally occurring L-amino acids
GPSTRXXMIEYDPERRLGIFWVSCEAGTYIRTLCVHLGLLLGVGGQMQELRRVRSGVMSXKDHXVTMHDVLXAQWLYXNHKDESXLRGVV

SEQ ID NO: 1743 - protein, 116 aa, Homo sapiens
  SITE (14): Xaa equals any of the naturally occurring L-amino acids
  SITE (21): Xaa equals any of the naturally occurring L-amino acids
  SITE (36): Xaa equals any of the naturally occurring L-amino acids
  SITE (74): Xaa equals any of the naturally occurring L-amino acids
  SITE (76): Xaa equals any of the naturally occurring L-amino acids
  SITE (78): Xaa equals any of the naturally occurring L-amino acids
  SITE (82): Xaa equals any of the naturally occurring L-amino acids
  SITE (84): Xaa equals any of the naturally occurring L-amino acids
  SITE (91): Xaa equals any of the naturally occurring L-amino acids
  SITE (112): Xaa equals any of the naturally occurring L-amino acids
  SITE (116): Xaa equals any of the naturally occurring L-amino acids
AGSVRRPCRRPWGXRAGERMXGAGEEDPAAAFLAQXRSEIAGIENDEAFAILERRRPRAPTARKVRRGVPMLLXGXMXWWIXTXKLMVPTXIMQYFKMDRLHQNLKYPKWRXKMEX

SEQ ID NO: 1744 - protein, 125 aa, Homo sapiens
  SITE (7): Xaa equals any of the naturally occurring L-amino acids
  SITE (8): Xaa equals any of the naturally occurring L-amino acids
  SITE (23): Xaa equals any of the naturally occurring L-amino acids
  SITE (61): Xaa equals any of the naturally occurring L-amino acids
  SITE (72): Xaa equals any of the naturally occurring L-amino acids
  SITE (86): Xaa equals any of the naturally occurring L-amino acids
  SITE (106): Xaa equals any of the naturally occurring L-amino acids
RVTTGTXXVLVAVDKGVFVLNKXNKLTQSKIWDVVEKADIGCTPGSGKDYAGVFSDAGLTXTSSSGQQTAQXAELQCPQPAARRRXSVQLTEKRMDKVGKYPKELXKCCEDGIRENPMKFSCQGG

SEQ ID NO: 1745 - protein, 74 aa, Homo sapiens
GAAVSVKMIEVLTTTDSQKLLHQLNALLEQESRCQPKVCGLRLIESAHDNGLRMTARLRDFEVKDLLSLTQFLA

SEQ ID NO: 1746 - protein, 38 aa, Homo sapiens
FFGHPEVYILILPGFGIISHIVTYYSGKKEPFGYIGMV

SEQ ID NO: 1747 - protein, 35 aa, Homo sapiens
LVPNSARETFLTICFIRQLIFHFTSKHHFGFEAAA

SEQ ID NO: 1748 - protein, 183 aa, Homo sapiens
  SITE (125): Xaa equals any of the naturally occurring L-amino acids
  SITE (133): Xaa equals any of the naturally occurring L-amino acids
  SITE (135): Xaa equals any of the naturally occurring L-amino acids
  SITE (149): Xaa equals any of the naturally occurring L-amino acids
  SITE (158): Xaa equals any of the naturally occurring L-amino acids
  SITE (168): Xaa equals any of the naturally occurring L-amino acids
  SITE (171): Xaa equals any of the naturally occurring L-amino acids
  SITE (172): Xaa equals any of the naturally occurring L-amino acids
  SITE (181): Xaa equals any of the naturally occurring L-amino acids
ARVENRAQQHWGSGVGVKKLCELQPEEKCCVVGTLFKAMPLQPSILREVSEEHNLLPQPPRSKYIHPDDELVLEDELQRIKLKGTIDVSKLVTGTVLAVFGSVRDDGKFLVEDYCFVDLAPQKPXPPLTQLGXVXGVRPGPGWRWRREXVGHPLLVDXVTGQFGDEGXHAXXPSFPVILVXTS

SEQ ID NO: 1749 - protein, 106 aa, Homo sapiens
HEAEAAPVGRARGCCKAEVAAEAETMFRAAAPGQLRRAASLLRFQSTLVIAEHANDSLAPITLNTITAATRLGGEVSCLVAGTKCDKVAQDLCKVAGIAKSSGGSA

SEQ ID NO: 1750 - protein, 99 aa, Homo sapiens
RSCGVTAQKYRCELLYEGPPDDEAAMGIKSCDPKGPLMMYISKMVPTSDKGRFYAFGRVFSGLVSTGLKVRIMGPNYTPGKKEDLYLKPIQRTILMMGR

SEQ ID NO: 1751 - protein, 124 aa, Homo sapiens
AAQPRLMEPIYLVEIQCPEQVVGGIYGVLNRKRGHVFEESQVAGTPMFVVKAYLPVNESFGFTADLRSNTGGQAFPQCVFDHWQILPGDPFDNSSRPSQVVAETRKRKGLKEGIPALDNFLDKL

SEQ ID NO: 1752 - protein, 180 aa, Homo sapiens
REQKLELHRGAAALELVDPPGCRNSARAQFARSLSAAPQLSDTADTMGFGDLKSPAGLQVLNDYLADKSYIEGYVPSQADVAVFEAVSSPPPADLCHALRWYNHIKSYEKEKASLPGVKKALGKYGPADVEDTTGSGATDSKDDDDIDLFGSDDEEESEEAKRLREERLAQYESKKAKKP

SEQ ID NO: 1753 - protein, 126 aa, Homo sapiens
  SITE (2): Xaa equals any of the naturally occurring L-amino acids
  SITE (4): Xaa equals any of the naturally occurring L-amino acids
  SITE (5): Xaa equals any of the naturally occurring L-amino acids
  SITE (6): Xaa equals any of the naturally occurring L-amino acids
  SITE (11): Xaa equals any of the naturally occurring L-amino acids
RXKXXXTAVRXSRLVDPPGCRNWHEVSFCDLCWDWKMSSGNAKIGHPAPNFKATAVMPDGQFKDISLSDYKGKYVVFFFYPLDFTFVCPTEIIAFSDRAEEFKKLNCQVIGASVDSHFCHLAWVNT

SEQ ID NO: 1754 - protein, 62 aa, Homo sapiens
  SITE (12): Xaa equals any of the naturally occurring L-amino acids
  SITE (15): Xaa equals any of the naturally occurring L-amino acids
  SITE (20): Xaa equals any of the naturally occurring L-amino acids
  SITE (21): Xaa equals any of the naturally occurring L-amino acids
  SITE (23): Xaa equals any of the naturally occurring L-amino acids
  SITE (24): Xaa equals any of the naturally occurring L-amino acids
  SITE (35): Xaa equals any of the naturally occurring L-amino acids
  SITE (43): Xaa equals any of the naturally occurring L-amino acids
  SITE (46): Xaa equals any of the naturally occurring L-amino acids
  SITE (49): Xaa equals any of the naturally occurring L-amino acids
  SITE (54): Xaa equals any of the naturally occurring L-amino acids
WIPRAAGIRHSXGGXLVHPXXVXXAAHCLKKNSQXWLGRHNLXEPXDTXQRVPXSHSFPHPL

SEQ ID NO: 1755 - protein, 42 aa, Homo sapiens
  SITE (2): Xaa equals any of the naturally occurring L-amino acids
  SITE (6): Xaa equals any of the naturally occurring L-amino acids
  SITE (19): Xaa equals any of the naturally occurring L-amino acids
  SITE (29): Xaa equals any of the naturally occurring L-amino acids
  SITE (42): Xaa equals any of the naturally occurring L-amino acids
EXCVSXLGCWRFNPQCFHXNRGPIKFNVXGHSRPGEFRGLEX

SEQ ID NO: 1756 - protein, 174 aa, Homo sapiens
REQKLELHRGAAALELVDPPGCRNSARAGMQKADVYSFGIILQEIALRSGPFYLEGLDLSPKEIVQKVRNGQRPYFRPSIDRTQLNEELVLLMERCWAQDPAERPDFGQIKGFIRRFNKEGGTSILDNLLLRMEQYANNLEKLVEERTQAYLEEKRKAEALLYQILPHSVAEQL

SEQ ID NO: 1757 - protein, 128 aa, Homo sapiens
  SITE (3): Xaa equals any of the naturally occurring L-amino acids
  SITE (5): Xaa equals any of the naturally occurring L-amino acids
  SITE (124): Xaa equals any of the naturally occurring L-amino acids
  SITE (125): Xaa equals any of the naturally occurring L-amino acids
  SITE (126): Xaa equals any of the naturally occurring L-amino acids
  SITE (128): Xaa equals any of the naturally occurring L-amino acids
ETXKXFKDPNAPKRPPSAFFLFCSEYRPKIKGEHPGLSIGDVAKKLGEMWNNTAADDKQPYEKKAAKLKEKYEKDIAAYRAKGKPDAAKKGVVKAEKSKKKKEEEEDEEDEEDEEEEEDEEDEXXXHX

SEQ ID NO: 1758 - protein, 31 aa, Homo sapiens
ARENVRPDYLKAIWNVINWENVTERYMACKK

SEQ ID NO: 1759 - protein, 64 aa, Homo sapiens
  SITE (5): Xaa equals any of the naturally occurring L-amino acids
  SITE (12): Xaa equals any of the naturally occurring L-amino acids
  SITE (34): Xaa equals any of the naturally occurring L-amino acids
REQKXELHRGAXRSRTSGSPGLQEFGTSSARQRXKVLAHFYGVKLEGKVPMHKLFLEMLEAMMD

SEQ ID NO: 1760 - protein, 106 aa, Homo sapiens
KMASNKTTLQKMGKKQNGKSKKVEEAEPEEFVVEKVLDRRVVNGKVEYFLKWKGFTDADNTWEPEENLDCPELIEAFLNSQKAGKEKDGTKRKSLSDSGSDDSKQR

SEQ ID NO: 1761 - protein, 69 aa, Homo sapiens
APASPLLEMDPNCSCATGGSCTCAGSCKCKECKCTSCKKSCCSCCPVGCAKCAQGCVCKGASEKCSCCA

SEQ ID NO: 1762 - protein, 41 aa, Homo sapiens
  SITE (13): Xaa equals any of the naturally occurring L-amino acids
  SITE (25): Xaa equals any of the naturally occurring L-amino acids
  SITE (36): Xaa equals any of the naturally occurring L-amino acids
  SITE (37): Xaa equals any of the naturally occurring L-amino acids
PCKGSIITWSLIXDLYEWLHEGSSXLLLLTSENDLXXKRRA

SEQ ID NO: 1763 - protein, 154 aa, Homo sapiens
  SITE (147): Xaa equals any of the naturally occurring L-amino acids
PTRPPTRPPSPNMAASAKKKNKKGKTISLTDFLAEDGGTGGGSTYVSKPVSWADETDDLEGDVSTTWHSNDDDVYRAPPIDRSILPTAPRAAREPNIDRSRLPKSPPYTAFLGNLPYDVTEESIKEFFRGLNISAVRLPREPSNPEXLKGLGML

SEQ ID NO: 1764 - protein, 80 aa, Homo sapiens
  SITE (2): Xaa equals any of the naturally occurring L-amino acids
  SITE (3): Xaa equals any of the naturally occurring L-amino acids
  SITE (16): Xaa equals any of the naturally occurring L-amino acids
  SITE (30): Xaa equals any of the naturally occurring L-amino acids
  SITE (39): Xaa equals any of the naturally occurring L-amino acids
  SITE (42): Xaa equals any of the naturally occurring L-amino acids
  SITE (61): Xaa equals any of the naturally occurring L-amino acids
  SITE (68): Xaa equals any of the naturally occurring L-amino acids
  SITE (70): Xaa equals any of the naturally occurring L-amino acids
  SITE (77): Xaa equals any of the naturally occurring L-amino acids
  SITE (78): Xaa equals any of the naturally occurring L-amino acids
AXXFPYTVDNARIVLXIDNARLAADDFRGXYETDLAMRXSVXNDIHGLRKVIDDTNITRLXLETEIEXLXEDLLFMXXNH

SEQ ID NO: 1765 - protein, 64 aa, Homo sapiens
  SITE (26): Xaa equals any of the naturally occurring L-amino acids
FGTRRNVKLIALSIDSVEDHLAWSKXINAYNCEEPTEKLPFPIIDDRNRELAILLGMLDPAREG

SEQ ID NO: 1766 - protein, 94 aa, Homo sapiens
  SITE (89): Xaa equals any of the naturally occurring L-amino acids
IRHEQAASSPEPTGCLLSQRRPLITVAMPGGLLLGDVAPNFEANTTVGRIRFHDFLGDSWGILFSHPRDFTPVCTTELGRAAKWHQNLXRGMLS

SEQ ID NO: 1767 - protein, 51 aa, Homo sapiens
  SITE (6): Xaa equals any of the naturally occurring L-amino acids
GVSCTXPVLQVQRVQMHLLQEELLLLLPCGCAKCAQGCICKGASEKCSCCA

SEQ ID NO: 1768 - protein, 143 aa, Homo sapiens
  SITE (4): Xaa equals any of the naturally occurring L-amino acids
  SITE (7): Xaa equals any of the naturally occurring L-amino acids
  SITE (8): Xaa equals any of the naturally occurring L-amino acids
QRTXGNXXACRYRTGIPGSTHASGRGHGLIAVCALHSVPHSPPTTCLAERTPCRRPAEMLRLPTVFRQMRPVSRVLAPHLTRAYAKDVKFGADARALMLQGVDLLADAVAVTMGPKGRTVIIEQSWGSPKVTRDGVTVAKSLT

SEQ ID NO: 1769 - protein, 168 aa, Homo sapiens
  SITE (7): Xaa equals any of the naturally occurring L-amino acids
  SITE (12): Xaa equals any of the naturally occurring L-amino acids
  SITE (41): Xaa equals any of the naturally occurring L-amino acids
  SITE (47): Xaa equals any of the naturally occurring L-amino acids
  SITE (115): Xaa equals any of the naturally occurring L-amino acids
  SITE (121): Xaa equals any of the naturally occurring L-amino acids
  SITE (131): Xaa equals any of the naturally occurring L-amino acids
  SITE (163): Xaa equals any of the naturally occurring L-amino acids
NSARACXAERTXCRRPAEMLRLPTVFRQMRPVSRVLAPHLXRAYAKXVKFGADARALMLQGVDLLADAVAVTMGPKGRTVIIEQSWGSPKVTKDGVTVAKSIDLKDKYKNIGAKXVQDVAXNTIEELGMAXPCYCYGTSIAKEGFEKVSKVLIHGNQERCDVXVDAVL

SEQ ID NO: 1770 - protein, 148 aa, Homo sapiens
GAEAFGAAKMPDYLGADQRKTKEDEKDDKPIRALDEGDIALLKTYGQSTYSRQIKQVEDDIQQLLKKINELTGIKESDTGLAPPALWDLAADKQTLQSEQPLQVARCTKIINADSEDPKYIINVKQFAKFVVDLSDQVAPTDIEEGMR

SEQ ID NO: 1771 - protein, 45 aa, Homo sapiens
  SITE (38): Xaa equals any of the naturally occurring L-amino acids
GRMAESSDKLYRVEYAKSGRASCKKCSETSPRTRSGWXSWCIAHV

SEQ ID NO: 1772 - protein, 81 aa, Homo sapiens
  SITE (5): Xaa equals any of the naturally occurring L-amino acids
  SITE (50): Xaa equals any of the naturally occurring L-amino acids
  SITE (65): Xaa equals any of the naturally occurring L-amino acids
  SITE (74): Xaa equals any of the naturally occurring L-amino acids
  SITE (76): Xaa equals any of the naturally occurring L-amino acids
LEAEXSLSRGDWYKTKEILLKGPDWILGEIKTSGLRGRGGAGFPNGLKWXFMIRPQMAGPSIWWXNANEGGAGXLXEPGGF

SEQ ID NO: 1773 - protein, 145 aa, Homo sapiens
  SITE (112): Xaa equals any of the naturally occurring L-amino acids
  SITE (118): Xaa equals any of the naturally occurring L-amino acids
CEKTTEGALPSSTAAASFFCRSWCCLCARLVRTWYLFCEAAAEETPALAMADEKPKEGVKTENNDHINLKVAGQDGSVVQFKIKRHTPLSKLMKAYCERQGLSMKQIRFRFXGQPINXTDTPAQLGNGRMKIPMMCSKQQTGGVY

SEQ ID NO: 1774 - protein, 122 aa, Homo sapiens
  SITE (47): Xaa equals any of the naturally occurring L-amino acids
  SITE (107): Xaa equals any of the naturally occurring L-amino acids
  SITE (110): Xaa equals any of the naturally occurring L-amino acids
  SITE (112): Xaa equals any of the naturally occurring L-amino acids
  SITE (115): Xaa equals any of the naturally occurring L-amino acids
HASAHASAPLAMASLTVKAYLLGKEDAAREIRRFSFCCSPEPEAGSXAAAGPGPLRAAAEPGGRPVPRAAAWRLSRRTTAIEDGDLLLFSIDEDLTWACSTLKMNLXDFXFXEKXFPAGTRQ

SEQ ID NO: 1775 - protein, 105 aa, Homo sapiens
  SITE (58): Xaa equals any of the naturally occurring L-amino acids
  SITE (72): Xaa equals any of the naturally occurring L-amino acids
  SITE (86): Xaa equals any of the naturally occurring L-amino acids
  SITE (90): Xaa equals any of the naturally occurring L-amino acids
  SITE (96): Xaa equals any of the naturally occurring L-amino acids
  SITE (100): Xaa equals any of the naturally occurring L-amino acids
  SITE (104): Xaa equals any of the naturally occurring L-amino acids
PRVRPRVRPRVRPRVRNELRVAPEEHPTLLTEAPLNPKANREKMTQIMFETFNVQAMXLAIQAVLSLYASGXTMESCWTLEMVSPXMSQXMRAMLXPMQXMGLXL

SEQ ID NO: 1776 - protein, 106 aa, Homo sapiens
  SITE (15): Xaa equals any of the naturally occurring L-amino acids
  SITE (27): Xaa equals any of the naturally occurring L-amino acids
  SITE (39): Xaa equals any of the naturally occurring L-amino acids
  SITE (47): Xaa equals any of the naturally occurring L-amino acids
  SITE (48): Xaa equals any of the naturally occurring L-amino acids
  SITE (63): Xaa equals any of the naturally occurring L-amino acids
  SITE (64): Xaa equals any of the naturally occurring L-amino acids
  SITE (69): Xaa equals any of the naturally occurring L-amino acids
  SITE (70): Xaa equals any of the naturally occurring L-amino acids
  SITE (77): Xaa equals any of the naturally occurring L-amino acids
  SITE (87): Xaa equals any of the naturally occurring L-amino acids
  SITE (104): Xaa equals any of the naturally occurring L-amino acids
PLRGNVVPSPLPTRXTRTFSATVRASXGPVYKGVCKCFXRSKGHGFXXPADGGPDIFLHIFEXXRGSMXXWKATRSXIKCASIPPKXEKLQAVGVRHQSPGTRXQV

SEQ ID NO: 1777 - protein, 90 aa, Homo sapiens
GLDMFSFVDLRLLLLLAATALLTHGQEEGQVEGQDEDIPPITCVQNGLRYHDRDVWKPEPCRICVCDNGKVLCDDVICDETKNCPGAEVP

SEQ ID NO: 1778 - protein, 64 aa, Homo sapiens
  SITE (3): Xaa equals any of the naturally occurring L-amino acids
  SITE (20): Xaa equals any of the naturally occurring L-amino acids
  SITE (23): Xaa equals any of the naturally occurring L-amino acids
  SITE (26): Xaa equals any of the naturally occurring L-amino acids
  SITE (33): Xaa equals any of the naturally occurring L-amino acids
  SITE (38): Xaa equals any of the naturally occurring L-amino acids
  SITE (45): Xaa equals any of the naturally occurring L-amino acids
  SITE (62): Xaa equals any of the naturally occurring L-amino acids
IIXNTENLVRELLTVPDNYXVIXLAXKWVRPIXCCPLXLIGLKAXKCADYVVTGTWSAKGAXKT

SEQ ID NO: 1779 - protein, 60 aa, Homo sapiens
  SITE (60): Xaa equals any of the naturally occurring L-amino acids
WLSSTAMYSAAGRDLGMEPHRAAGPLPAANFRPDVFNGGDYTGQLLEKILPIVASEYSIX

SEQ ID NO: 1780 - protein, 60 aa, Homo sapiens
  SITE (3): Xaa equals any of the naturally occurring L-amino acids
  SITE (17): Xaa equals any of the naturally occurring L-amino acids
  SITE (40): Xaa equals any of the naturally occurring L-amino acids
  SITE (59): Xaa equals any of the naturally occurring L-amino acids
TLXLHKIQKLRWAWCCXPIVPLLVGLRQEDHLSPGGRGYXAPRVHYCTPARARRARPCXK

SEQ ID NO: 1781 - protein, 67 aa, Homo sapiens
  SITE (10): Xaa equals any of the naturally occurring L-amino acids
  SITE (16): Xaa equals any of the naturally occurring L-amino acids
  SITE (21): Xaa equals any of the naturally occurring L-amino acids
  SITE (23): Xaa equals any of the naturally occurring L-amino acids
  SITE (34): Xaa equals any of the naturally occurring L-amino acids
  SITE (38): Xaa equals any of the naturally occurring L-amino acids
  SITE (39): Xaa equals any of the naturally occurring L-amino acids
  SITE (41): Xaa equals any of the naturally occurring L-amino acids
  SITE (57): Xaa equals any of the naturally occurring L-amino acids
GCRVNQAAVXWHEQVXWLSEXRXGETVYYRLLPXKNVXXRXARGLVFKECRQSASMXRVLAVYGVKR

SEQ ID NO: 1782 - protein, 152 aa, Homo sapiens
  SITE (10): Xaa equals any of the naturally occurring L-amino acids
  SITE (127): Xaa equals any of the naturally occurring L-amino acids
  SITE (148): Xaa equals any of the naturally occurring L-amino acids
  SITE (149): Xaa equals any of the naturally occurring L-amino acids
  SITE (150): Xaa equals any of the naturally occurring L-amino acids
  SITE (151): Xaa equals any of the naturally occurring L-amino acids
RPTRPLTSTXAVGKNKRLTKGGKKGAKKKVVDPFSKKDWYDVKAPAMFNIRNIGKTLVTRTQGTKIASDGLKGRVFEVSLADLQNDEVAFRKFKLITEDVQGKNCLTNFHGMDLTRDKMCSMVKKWXTMIEAHVDVKTTDGYLLRCSXXXXL

SEQ ID NO: 1783 - protein, 127 aa, Homo sapiens
  SITE (7): Xaa equals any of the naturally occurring L-amino acids
  SITE (82): Xaa equals any of the naturally occurring L-amino acids
HRVRQRXPTLARAMASVSELACIYSALILHDDEVTVTEDKINALIKAAGVNVEPFWPGLFAKALANVNIGSLICNVGAGGPXPAAGAAPAGGPAPSTAAAPAEEKKVEAKKEESEESYDDMGFGLFD

SEQ ID NO: 1784 - protein, 101 aa, Homo sapiens
  SITE (9): Xaa equals any of the naturally occurring L-amino acids
  SITE (16): Xaa equals any of the naturally occurring L-amino acids
  SITE (67): Xaa equals any of the naturally occurring L-amino acids
  SITE (68): Xaa equals any of the naturally occurring L-amino acids
GSAAGSTAXSLLSTGXPRPTRPDKARRLGYKAKQGYVIYRIRVRRGGRKRPVPKGATYGKPVHHGVXXLKFARSLQSVAEERAGRHCGALRVLNSYWVGED

SEQ ID NO: 1785 - protein, 123 aa, Homo sapiens
AKMGAYKYIQELWRKKQSDVMRFLLRVRCWQYRQLSALHRAPRPTRPDKARRLGYKAKQGYVIYRIRVRRGGRKRPVPKGAITASLSIMVLTAKVCSKPSVRCRGASWTPLWGSESPEFLLGW

SEQ ID NO: 1786 - protein, 137 aa, Homo sapiens
  SITE (2): Xaa equals any of the naturally occurring L-amino acids
  SITE (5): Xaa equals any of the naturally occurring L-amino acids
  SITE (7): Xaa equals any of the naturally occurring L-amino acids
  SITE (9): Xaa equals any of the naturally occurring L-amino acids
  SITE (11): Xaa equals any of the naturally occurring L-amino acids
  SITE (14): Xaa equals any of the naturally occurring L-amino acids
  SITE (38): Xaa equals any of the naturally occurring L-amino acids
  SITE (57): Xaa equals any of the naturally occurring L-amino acids
IXIKXTXTXGXKLXLHRGGGRSSTSGSPGSAGIRHERXKRDDEGTSSFGKRRNKTHXLCRRCGSKAYHLQKSTCGKCGYPAKRKRKYNWSAKAKRRNTTGTGRMRHLKIVYRRFRHGFREGTTPKPKRAAVAASSSS

SEQ ID NO: 1787 - protein, 128 aa, Homo sapiens
  SITE (2): Xaa equals any of the naturally occurring L-amino acids
  SITE (7): Xaa equals any of the naturally occurring L-amino acids
LXLTKGXKSWGSTAVTTALELVDPPGCRNSARGRGDMAKRTKKVGIVGKYGTRYGASLRKMVKKIEISQHAKYTCSFCGKTKMKRRAVGIWHCGSCMKTVAGGAWTYNTTSAVTVKSAIRRLKELKDQ

SEQ ID NO: 1788 - protein, 95 aa, Homo sapiens [sequence omitted]

SEQ ID NO: 1789 - protein, 113 aa, Homo sapiens
  SITE (72): Xaa equals any of the naturally occurring L-amino acids
  SITE (75): Xaa equals any of the naturally occurring L-amino acids
  SITE (93): Xaa equals any of the naturally occurring L-amino acids
  SITE (104): Xaa equals any of the naturally occurring L-amino acids
  SITE (105): Xaa equals any of the naturally occurring L-amino acids
  SITE (111): Xaa equals any of the naturally occurring L-amino acids
QSLGRGDMAKRTKKVGIVGKYGTRYGASLRKMVKKIEISQHAKYTCSFCGKTKMKRRAVGIWHCGSCMKTVXGGXWTYNTTSAVTVKVRHQKXEGVERPLDVPXXFGTSLXYN

SEQ ID NO: 1790 - protein, 24 aa, Homo sapiens
IPCLKPKNFGIGQDIQPKRDSPAL

SEQ ID NO: 1791 - protein, 70 aa, Homo sapiens
  SITE (32): Xaa equals any of the naturally occurring L-amino acids
  SITE (43): Xaa equals any of the naturally occurring L-amino acids
  SITE (48): Xaa equals any of the naturally occurring L-amino acids
  SITE (49): Xaa equals any of the naturally occurring L-amino acids
RRCALRAVDFAERNGYIKGIVKDIIHDPGRGXPLAKVVFRDPXRLRSXXELFIAAEGIHTGQFVYCRKKA

SEQ ID NO: 1792 - protein, 110 aa, Homo sapiens
  SITE (4): Xaa equals any of the naturally occurring L-amino acids
  SITE (10): Xaa equals any of the naturally occurring L-amino acids
  SITE (12): Xaa equals any of the naturally occurring L-amino acids
  SITE (27): Xaa equals any of the naturally occurring L-amino acids
  SITE (28): Xaa equals any of the naturally occurring L-amino acids
  SITE (58): Xaa equals any of the naturally occurring L-amino acids
  SITE (82): Xaa equals any of the naturally occurring L-amino acids
  SITE (87): Xaa equals any of the naturally occurring L-amino acids
  SITE (93): Xaa equals any of the naturally occurring L-amino acids
  SITE (95): Xaa equals any of the naturally occurring L-amino acids
  SITE (96): Xaa equals any of the naturally occurring L-amino acids
  SITE (100): Xaa equals any of the naturally occurring L-amino acids
  SITE (105): Xaa equals any of the naturally occurring L-amino acids
GRVXRPTRPXEXRGGGGLGAFKIQLHXXATGMAEEGIAAGGVMDVNTALQEVLKTALXHDGLARGIREAAKALDKRQAHLCXLASNXDEPMYXKXXEALXAEHQXNLIKG

SEQ ID NO: 1793 - protein, 92 aa, Homo sapiens
  SITE (42): Xaa equals any of the naturally occurring L-amino acids
  SITE (43): Xaa equals any of the naturally occurring L-amino acids
LVPNSARAAIMGRMHAPGKGLSQSALPYRRSVPTWLKLTSDXXKEQIYKLAKKGLTPSQIGVILRDSHGVAQVRFVTGNKILRILKSKGLAP

SEQ ID NO: 1794 - protein, 105 aa, Homo sapiens
IAIVNDTVTIRTRKFMTNRLLQRKQMVIDVLHPGKATVPKTEIREKLAKMYKTTPDVIFVFGFRTHFGGGKTTGFGMIYDSLDYAKKNEPKHRLARHGLYEKKKT

SEQ ID NO: 1795 - protein, 92 aa, Homo sapiens
VDPRVRYDTKGRFAVHRITPEEAKYKLCKVRKIFVGTKGIPHLVTHDARTIRYPDPLIKVNDTIQIDLETGKITDFIKFDTGNLCMVTGGAN

SEQ ID NO: 1796 - protein, 130 aa, Homo sapiens
  SITE (90): Xaa equals any of the naturally occurring L-amino acids
  SITE (101): Xaa equals any of the naturally occurring L-amino acids
  SITE (113): Xaa equals any of the naturally occurring L-amino acids
GIFRDNWHKRRKTGGKRKPYHKKRKYELGRPAANTKIGPRRIHTVRVRGGNKKYRALRLDVGNFSWGSECCTRKTRIIDVVYNASNNELXRTKTLVKNCIXLIDSTPYRQWYXVPLCAAPGPQEGSQADS

SEQ ID NO: 1797 - protein, 106 aa, Homo sapiens
  SITE (47): Xaa equals any of the naturally occurring L-amino acids
  SITE (59): Xaa equals any of the naturally occurring L-amino acids
  SITE (80): Xaa equals any of the naturally occurring L-amino acids
  SITE (87): Xaa equals any of the naturally occurring L-amino acids
  SITE (92): Xaa equals any of the naturally occurring L-amino acids
  SITE (98): Xaa equals any of the naturally occurring L-amino acids
  SITE (99): Xaa equals any of the naturally occurring L-amino acids
  SITE (102): Xaa equals any of the naturally occurring L-amino acids
  SITE (103): Xaa equals any of the naturally occurring L-amino acids
  SITE (106): Xaa equals any of the naturally occurring L-amino acids
PRAGGCGGSGRVTACLCACATLVWPPRFQEVLLVLSGLVHARGCTYXQLWSRSHPFCCXRGPLAMAGILFEDIFDVKDIXPEGKKFXRVSRXHCESEXXRWXXTKX

SEQ ID NO: 1798 - protein, 140 aa, Homo sapiens
  SITE (2): Xaa equals any of the naturally occurring L-amino acids
  SITE (3): Xaa equals any of the naturally occurring L-amino acids
  SITE (6): Xaa equals any of the naturally occurring L-amino acids
  SITE (7): Xaa equals any of the naturally occurring L-amino acids
  SITE (13): Xaa equals any of the naturally occurring L-amino acids
  SITE (14): Xaa equals any of the naturally occurring L-amino acids
  SITE (15): Xaa equals any of the naturally occurring L-amino acids
  SITE (16): Xaa equals any of the naturally occurring L-amino acids
KXXEPXXRIERAXXXXLKKSGKLKVPEWVDTVKLAKHKELAPYDENWFYTRAASTARHLYLRGGAGVGSMTKIYGGRQRNGVMPSHFSRGSKSVARRVLQALEGLKMVEKDQDGGRKLTPQGQRDLDRIAGQVAASNKKH

SEQ ID NO: 1799 - protein, 126 aa, Homo sapiens
  SITE (10): Xaa equals any of the naturally occurring L-amino acids
  SITE (126): Xaa equals any of the naturally occurring L-amino acids
VDPRVRKTVXELDKGMQERTGAATARRESLPQANNPEQLCKQRCINEASWTMKLVLSCVPEPTVVMAARALCMLGLVLALLSSSSARELRGACLPNQCAVPAKDRVELRLTPMFTPKDCKNRGCCX

SEQ ID NO: 1800 - protein, 140 aa, Homo sapiens
  SITE (123): Xaa equals any of the naturally occurring L-amino acids
  SITE (126): Xaa equals any of the naturally occurring L-amino acids
  SITE (133): Xaa equals any of the naturally occurring L-amino acids
GYLHSLNIVYRDLKPENILLDSQGHIVLTDFGLCKENIEHNSTTSTFCGTPEYLAPEVLHKQPYDRTVDWWCLGAFLYEMLYGLPPFYSRNTAEMYDNILNKPLQLKPNITNSARHLLEGLLXKDXTKRLGGXGDFMEIK

SEQ ID NO: 1801 - protein, 92 aa, Homo sapiens
  SITE (77): Xaa equals any of the naturally occurring L-amino acids
  SITE (81): Xaa equals any of the naturally occurring L-amino acids
  SITE (92): Xaa equals any of the naturally occurring L-amino acids
ATMPQYQTWEEFSRAAEKLYLADPMKARVVLKYRHSDGNLCVKVTDDLVCLVYKTDQAQDVKKIEKFHSQLMRLIVXQGAXNLPWELSEWFX

SEQ ID NO: 1802 - protein, 176 aa, Homo sapiens
  SITE (4): Xaa equals any of the naturally occurring L-amino acids
  SITE (14): Xaa equals any of the naturally occurring L-amino acids
  SITE (19): Xaa equals any of the naturally occurring L-amino acids
  SITE (21): Xaa equals any of the naturally occurring L-amino acids
  SITE (52): Xaa equals any of the naturally occurring L-amino acids
  SITE (70): Xaa equals any of the naturally occurring L-amino acids
  SITE (96): Xaa equals any of the naturally occurring L-amino acids
  SITE (115): Xaa equals any of the naturally occurring L-amino acids
  SITE (134): Xaa equals any of the naturally occurring L-amino acids
  SITE (140): Xaa equals any of the naturally occurring L-amino acids
  SITE (163): Xaa equals any of the naturally occurring L-amino acids
  SITE (166): Xaa equals any of the naturally occurring L-amino acids
RGAXRSRTSGSPGXAGIRXRXVSQKTVIIKEEEEDTAEKPGKEEDVVTPKPXKRKRDQAEEEPNRIPSRXLRRTKLNQESTAPKVLFTGVVDARGXRAVLAWGEIWLVHGQSFPXVHGSHPPDIQFLCGPGAGXSPFCSXDGWHHSRQAGFLLTPDEYVVNDXAPXEEFGFTFKTH

SEQ ID NO: 1803 - protein, 39 aa, Homo sapiens
GSLAVTKNDGHYRGDPNWFMKYVAPRELGSPHGVGGGLF

SEQ ID NO: 1804 - protein, 42 aa, Homo sapiens
GSLLSPDMANKGPSYGMSREVQSKIEKKYDEELGGAAGGVGP

SEQ ID NO: 1805 - protein, 165 aa, Homo sapiens
  SITE (110): Xaa equals any of the naturally occurring L-amino acids
  SITE (114): Xaa equals any of the naturally occurring L-amino acids
  SITE (117): Xaa equals any of the naturally occurring L-amino acids
  SITE (129): Xaa equals any of the naturally occurring L-amino acids
  SITE (130): Xaa equals any of the naturally occurring L-amino acids
  SITE (135): Xaa equals any of the naturally occurring L-amino acids
  SITE (137): Xaa equals any of the naturally occurring L-amino acids
  SITE (141): Xaa equals any of the naturally occurring L-amino acids
  SITE (142): Xaa equals any of the naturally occurring L-amino acids
  SITE (145): Xaa equals any of the naturally occurring L-amino acids
  SITE (148): Xaa equals any of the naturally occurring L-amino acids
  SITE (154): Xaa equals any of the naturally occurring L-amino acids
  SITE (155): Xaa equals any of the naturally occurring L-amino acids
  SITE (156): Xaa equals any of the naturally occurring L-amino acids
  SITE (160): Xaa equals any of the naturally occurring L-amino acids
  SITE (163): Xaa equals any of the naturally occurring L-amino acids
FGTRLDQIRQRESDITKERIQKILATGANVILTTGGIDDMCLKYFVEAGAMAVRRVLKRDLKRIAKASGATILSTLANLEGEETFEAAMLGQAEEVVQERFCDDELILIXIPRXDGXIGFFRGAKFSRXXGGGLXKXLFGXXFGXIGXPGVLKXXXPKIXPGXDL

SEQ ID NO: 1806 - protein, 91 aa, Homo sapiens
  SITE (11): Xaa equals any of the naturally occurring L-amino acids
  SITE (14): Xaa equals any of the naturally occurring L-amino acids
  SITE (15): Xaa equals any of the naturally occurring L-amino acids
  SITE (18): Xaa equals any of the naturally occurring L-amino acids
  SITE (28): Xaa equals any of the naturally occurring L-amino acids
  SITE (79): Xaa equals any of the naturally occurring L-amino acids
  SITE (82): Xaa equals any of the naturally occurring L-amino acids
  SITE (89): Xaa equals any of the naturally occurring L-amino acids
IAGKLQDGLLXITXXSFXAPWNSLSLAXAGASPRPTLLAVRNAQCFPVYPSPVKLQSGTHCLWTDQLLQGSEKGFQFPXTLXGLTSGSXGL

SEQ ID NO: 1807 - protein, 123 aa, Homo sapiens
  SITE (102): Xaa equals any of the naturally occurring L-amino acids
ARPSRRRRRRRRPLGLAMSSSPVKRQRMESALDQLKQFTTVVADTGDFHAIDEYKPQDATTNPSLILAAAQMPAYQELVEEAIAYGRKLGGSQEDQIKNAIXKLFVLFGAEILKKIPGRVSTE

SEQ ID NO: 1808 - protein, 131 aa, Homo sapiens
  SITE (58): Xaa equals any of the naturally occurring L-amino acids
  SITE (114): Xaa equals any of the naturally occurring L-amino acids
  SITE (124): Xaa equals any of the naturally occurring L-amino acids
RLRGGCSVLSVQAAAGLSQRRPPFTLRARSPAVLPFRCPPCHHDGTGHLLRQRLLGRXIAAAISKTAVAPIERVKLLLQVQHASKQIAADKQYKGIVDCIVRIPRSRRVSFWRXTLQRHRYFPXKPQFASR

SEQ ID NO: 1809 - protein, 93 aa, Homo sapiens
  SITE (47): Xaa equals any of the naturally occurring L-amino acids
DWSKVVLAYEPVWAIGTGKTATPQQAQEVHEKLRGWLKSNVSDAVAXSTRIIYGGSVTGATCKELASQPDVDGFLVGGASLKPEFVDIINAKQ

SEQ ID NO: 1810 - protein, 150 aa, Homo sapiens
  SITE (9): Xaa equals any of the naturally occurring L-amino acids
  SITE (61): Xaa equals any of the naturally occurring L-amino acids
  SITE (64): Xaa equals any of the naturally occurring L-amino acids
  SITE (73): Xaa equals any of the naturally occurring L-amino acids
  SITE (79): Xaa equals any of the naturally occurring L-amino acids
  SITE (89): Xaa equals any of the naturally occurring L-amino acids
  SITE (90): Xaa equals any of the naturally occurring L-amino acids
  SITE (100): Xaa equals any of the naturally occurring L-amino acids
  SITE (107): Xaa equals any of the naturally occurring L-amino acids
  SITE (116): Xaa equals any of the naturally occurring L-amino acids
  SITE (117): Xaa equals any of the naturally occurring L-amino acids
  SITE (118): Xaa equals any of the naturally occurring L-amino acids
  SITE (119): Xaa equals any of the naturally occurring L-amino acids
  SITE (123): Xaa equals any of the naturally occurring L-amino acids
  SITE (126): Xaa equals any of the naturally occurring L-amino acids
  SITE (138): Xaa equals any of the naturally occurring L-amino acids
  SITE (147): Xaa equals any of the naturally occurring L-amino acids
IRHEGRGIXIERVVSSEGGRPSVDLSFQPSKPLSKSSSSPELQTLQDILGDPGDKADVGRXSPXVKARSQSGXLDGESXAWSVSGEDSXXQPEGPLTSRXPRFAQVXSGPVGYNIXXXXPSRXGKXLERDALRAEHSXIQRSSRITXFVS

SEQ ID NO: 1811 - protein, 189 aa, Homo sapiens
  SITE (3): Xaa equals any of the naturally occurring L-amino acids
  SITE (162): Xaa equals any of the naturally occurring L-amino acids
  SITE (170): Xaa equals any of the naturally occurring L-amino acids
  SITE (178): Xaa equals any of the naturally occurring L-amino acids
GRXQPSLKGTKAGAPPRCGRSRTSGSPGLQEFGTSEDEINRRTAAENEFVVLKKDVDAAYMSKVELEAKVDALNDEINFLRTLNETELTELQSQISDTSVVLSMDNSRSLDLDGIIAEVKAQYEEMAKCSRAEAEAWYQTKFETLQAQAGKHGDDLRNTRNXISEMNRAXQRLQAEIXNIKNQRAKLEA

SEQ ID NO: 1812 - protein, 42 aa, Homo sapiens
  SITE (12): Xaa equals any of the naturally occurring L-amino acids
  SITE (13): Xaa equals any of the naturally occurring L-amino acids
  SITE (26): Xaa equals any of the naturally occurring L-amino acids
LLASLANLALPXXINLLGELSVASNXVLLIKYHSPTYRNSTY

SEQ ID NO: 1813 - protein, 121 aa, Homo sapiens
  SITE (103): Xaa equals any of the naturally occurring L-amino acids
  SITE (106): Xaa equals any of the naturally occurring L-amino acids
  SITE (109): Xaa equals any of the naturally occurring L-amino acids
  SITE (116): Xaa equals any of the naturally occurring L-amino acids
  SITE (121): Xaa equals any of the naturally occurring L-amino acids
WPPVLAFLGCVWSLGPCLWGKSNRTLALPKMKGEEMGLLFLSPEWERSSGGWSFSTEEGSLKALLTSCCTFCISLHAHCLFLFLALAPVPVPAPANAKMQMHXLAXRVXAGLSCEXGGWAX

SEQ ID NO: 1814 - protein, 28 aa, Homo sapiens
  SITE (17): Xaa equals any of the naturally occurring L-amino acids
  SITE (18): Xaa equals any of the naturally occurring L-amino acids
  SITE (20): Xaa equals any of the naturally occurring L-amino acids
  SITE (25): Xaa equals any of the naturally occurring L-amino acids
REREREREREREREREXXPXSAPHXSSP

SEQ ID NO: 1815 - protein, 79 aa, Homo sapiens
  SITE (3): Xaa equals any of the naturally occurring L-amino acids
  SITE (9): Xaa equals any of the naturally occurring L-amino acids
  SITE (23): Xaa equals any of the naturally occurring L-amino acids
  SITE (52): Xaa equals any of the naturally occurring L-amino acids
IRXSGNANXENGEQEADNEVDEXEEEGGEEEEEEEEGDGEEEDGDEDEEAEXSYGPSGQLKMMRMTMSIPRSRRPTRMT

SEQ ID NO: 1816 - protein, 21 aa, Homo sapiens
KLKPGAIDIVPQGKMKNYNQA

SEQ ID NO: 1817 - protein, 76 aa, Homo sapiens
GKRGEAFPRSSQRWRFGRGFGGCSRFAGTLVISLAPLLPAHSPGLAQYIGTCGFYFVFDVPDRNRARGTAKTTVGS

SEQ ID NO: 1818 - protein, 76 aa, Homo sapiens
  SITE (2): Xaa equals any of the naturally occurring L-amino acids
  SITE (4): Xaa equals any of the naturally occurring L-amino acids
  SITE (5): Xaa equals any of the naturally occurring L-amino acids
  SITE (7): Xaa equals any of the naturally occurring L-amino acids
  SITE (8): Xaa equals any of the naturally occurring L-amino acids
  SITE (10): Xaa equals any of the naturally occurring L-amino acids
  SITE (14): Xaa equals any of the naturally occurring L-amino acids
  SITE (15): Xaa equals any of the naturally occurring L-amino acids
  SITE (31): Xaa equals any of the naturally occurring L-amino acids
  SITE (33): Xaa equals any of the naturally occurring L-amino acids
  SITE (37): Xaa equals any of the naturally occurring L-amino acids
  SITE (42): Xaa equals any of the naturally occurring L-amino acids
  SITE (51): Xaa equals any of the naturally occurring L-amino acids
  SITE (53): Xaa equals any of the naturally occurring L-amino acids
  SITE (62): Xaa equals any of the naturally occurring L-amino acids
  SITE (72): Xaa equals any of the naturally occurring L-amino acids
  SITE (76): Xaa equals any of the naturally occurring L-amino acids
HXIXXYXXPXPKRXXNTACTSQRKIQNTTQXSXTEEXFPPTXTPGLHQPNXTXVGFGFDSQXVLCWLQRIDXLDGX

SEQ ID NO: 1819 - protein, 44 aa, Homo sapiens
RMFLLPKNVKPTMEDWGRGGMKYKIMIIYTELGFFMFCKKVFIS

SEQ ID NO: 1820 - protein, 36 aa, Homo sapiens
  SITE (1): Xaa equals any of the naturally occurring L-amino acids
  SITE (32): Xaa equals any of the naturally occurring L-amino acids
  SITE (35): Xaa equals any of the naturally occurring L-amino acids
  SITE (36): Xaa equals any of the naturally occurring L-amino acids
XSGIGRGALRLKSFTSEKKKKKKKKKKKKKKXKKXX

SEQ ID NO: 1821 - protein, 32 aa, Homo sapiens
  SITE (1): Xaa equals any of the naturally occurring L-amino acids
  SITE (5): Xaa equals any of the naturally occurring L-amino acids
  SITE (12): Xaa equals any of the naturally occurring L-amino acids
  SITE (32): Xaa equals any of the naturally occurring L-amino acids
XNTLXGVKMKIXTQDMNIFSCNLTIKAFSHTX

SEQ ID NO: 1822 - protein, 39 aa, Homo sapiens
  SITE (2): Xaa equals any of the naturally occurring L-amino acids
  SITE (4): Xaa equals any of the naturally occurring L-amino acids
  SITE (31): Xaa equals any of the naturally occurring L-amino acids
  SITE (35): Xaa equals any of the naturally occurring L-amino acids
  SITE (37): Xaa equals any of the naturally occurring L-amino acids
  SITE (38): Xaa equals any of the naturally occurring L-amino acids
  SITE (39): Xaa equals any of the naturally occurring L-amino acids
GXGXNPASTKNTKKKKKKKKKKKKKKKKKKXKKKXKXXX

SEQ ID NO: 1823 - protein, 118 aa, Homo sapiens
  SITE (1): Xaa equals any of the naturally occurring L-amino acids
  SITE (3): Xaa equals any of the naturally occurring L-amino acids
  SITE (18): Xaa equals any of the naturally occurring L-amino acids
  SITE (23): Xaa equals any of the naturally occurring L-amino acids
  SITE (82): Xaa equals any of the naturally occurring L-amino acids
XNXSITHCTHQGKPGYAXQVTGXGNSRVDPRVRPRVRPRVRPRVRSCHDLYLMVFISRVHLREATLSSRAQMERRFCAVGSXLPRSGVREENYPAGFNLFHPVCSPGVASALRTIRFT

SEQ ID NO: 1824 - protein, 95 aa, Homo sapiens
  SITE (59): Xaa equals any of the naturally occurring L-amino acids
  SITE (74): Xaa equals any of the naturally occurring L-amino acids
  SITE (76): Xaa equals any of the naturally occurring L-amino acids
  SITE (78): Xaa equals any of the naturally occurring L-amino acids
  SITE (84): Xaa equals any of the naturally occurring L-amino acids
  SITE (85): Xaa equals any of the naturally occurring L-amino acids
DQGCSVRAPPRHDFLQLSPVVGHVVLRRPGRRLRGVLGRGSPFARPAFTGAPAAAAYPXPPPALCPRPPRGPTXVXKXGVLNRXXTGCWAGNEEA

SEQ ID NO: 1825 - protein, 17 aa, Homo sapiens
  SITE (1): Xaa equals any of the naturally occurring L-amino acids
  SITE (6): Xaa equals any of the naturally occurring L-amino acids
XYSESXYNSLAVVLQPR

SEQ ID NO: 1826 - protein, 69 aa, Homo sapiens
  SITE (9): Xaa equals any of the naturally occurring L-amino acids
  SITE (33): Xaa equals any of the naturally occurring L-amino acids
  SITE (39): Xaa equals any of the naturally occurring L-amino acids
  SITE (40): Xaa equals any of the naturally occurring L-amino acids
TCRALLRRXAVFQPSPNAFFRCVSEDLGFAVLXTQLMLXXLRFTGFITVGITPKASPLHVTEHVLNQRS

SEQ ID NO: 1827 - protein, 167 aa, Homo sapiens
  SITE (18): Xaa equals any of the naturally occurring L-amino acids
  SITE (19): Xaa equals any of the naturally occurring L-amino acids
  SITE (20): Xaa equals any of the naturally occurring L-amino acids
  SITE (39): Xaa equals any of the naturally occurring L-amino acids
  SITE (78): Xaa equals any of the naturally occurring L-amino acids
  SITE (85): Xaa equals any of the naturally occurring L-amino acids
  SITE (98): Xaa equals any of the naturally occurring L-amino acids
  SITE (101): Xaa equals any of the naturally occurring L-amino acids
  SITE (110): Xaa equals any of the naturally occurring L-amino acids
  SITE (112): Xaa equals any of the naturally occurring L-amino acids
  SITE (114): Xaa equals any of the naturally occurring L-amino acids
  SITE (122): Xaa equals any of the naturally occurring L-amino acids
  SITE (123): Xaa equals any of the naturally occurring L-amino acids
  SITE (136): Xaa equals any of the naturally occurring L-amino acids
  SITE (146): Xaa equals any of the naturally occurring L-amino acids
  SITE (147): Xaa equals any of the naturally occurring L-amino acids
  SITE (159): Xaa equals any of the naturally occurring L-amino acids
GEAFGSTLWDGPWRALPXXXGWRRKRPIWGWGPPSPWNXSGSDAWCAWSTRELVRDVAKMLPTLGGERKGSPRILPRXPPRKLGXLFLPGAQGTHYLXPPXVWAQTRFPXTXQXLLASPFPXXKKKQKGGGKKRGXLGGPFKGPPXXRFPFLKIGKNPXGVPSSPPF

SEQ ID NO: 1828 - protein, 23 aa, Homo sapiens
  SITE (18): Xaa equals any of the naturally occurring L-amino acids
  SITE (20): Xaa equals any of the naturally occurring L-amino acids
  SITE (22): Xaa equals any of the naturally occurring L-amino acids
  SITE (23): Xaa equals any of the naturally occurring L-amino acids
PYSESYYNSLAVVLQRRXVXNXX

SEQ ID NO: 1829 - protein, 35 aa, Homo sapiens
  SITE (1): Xaa equals any of the naturally occurring L-amino acids
  SITE (3): Xaa equals any of the naturally occurring L-amino acids
  SITE (7): Xaa equals any of the naturally occurring L-amino acids
  SITE (9): Xaa equals any of the naturally occurring L-amino acids
  SITE (11): Xaa equals any of the naturally occurring L-amino acids
  SITE (15): Xaa equals any of the naturally occurring L-amino acids
  SITE (20): Xaa equals any of the naturally occurring L-amino acids
  SITE (25): Xaa equals any of the naturally occurring L-amino acids
XRXKHMXFXFXLTLXLPTSXPEQHXSCFDTHLHLY

SEQ ID NO: 1830 - protein, 74 aa, Homo sapiens
  SITE (41): Xaa equals any of the naturally occurring L-amino acids
  SITE (61): Xaa equals any of the naturally occurring L-amino acids
  SITE (68): Xaa equals any of the naturally occurring L-amino acids
  SITE (72): Xaa equals any of the naturally occurring L-amino acids
  SITE (74): Xaa equals any of the naturally occurring L-amino acids
PRSPRVLHHVSVLWGGSKGPWSWPRPRHRERLDFLSLCAEXLRWRPLSLTQQLKHTISGSXWLPHPLXCPLXSX

SEQ ID NO: 1831 - protein, 43 aa, Homo sapiens
  SITE (32): Xaa equals any of the naturally occurring L-amino acids
  SITE (35): Xaa equals any of the naturally occurring L-amino acids
  SITE (43): Xaa equals any of the naturally occurring L-amino acids
GTSGTRGGPVPNSPYSESYYNSLAVVLQLRDXGNXKYFRARMX

SEQ ID NO: 1832 - protein, 66 aa, Homo sapiens [sequence omitted]

SEQ ID NO: 1833 - protein, 40 aa, Homo sapiens
  SITE (18): Xaa equals any of the naturally occurring L-amino acids
  SITE (30): Xaa equals any of the naturally occurring L-amino acids
  SITE (38): Xaa equals any of the naturally occurring L-amino acids
SFPRTTGVSSLIVCYAMXHLKQYFILLFFXKTQNTCNXKP

SEQ ID NO: 1834 - protein, 71 aa, Homo sapiens
  SITE (2): Xaa equals any of the naturally occurring L-amino acids
  SITE (26): Xaa equals any of the naturally occurring L-amino acids
  SITE (43): Xaa equals any of the naturally occurring L-amino acids
AXRVGGTHASVDPRVRDLGNYPNKLXSPLSCQYWNCSSQVFAXISHPERKNDRENLCSDTTDSYIVEQYLS

SEQ ID NO: 1835 - protein, 58 aa, Homo sapiens
  SITE (45): Xaa equals any of the naturally occurring L-amino acids
ICPQNPLNPLGNLTGSPKRNSSLDTRKKPWRESKKFNTHSRPKSXHQLRKRSSSTPTT

SEQ ID NO: 1836 - protein, 80 aa, Homo sapiens
  SITE (49): Xaa equals any of the naturally occurring L-amino acids
VCWPVGFGTSFSERRRKLPWLEPCSAGKGVWRPLLGKWRTTSGAEEACXRKVSRIHHKRATRAWKKLKTCYPPSLLHPGT

SEQ ID NO: 1837 - protein, 24 aa, Homo sapiens
  SITE (2): Xaa equals any of the naturally occurring L-amino acids
  SITE (20): Xaa equals any of the naturally occurring L-amino acids
  SITE (23): Xaa equals any of the naturally occurring L-amino acids
GXGRERERTSLVFFFFFFGXKIXF

SEQ ID NO: 1838 - protein, 127 aa, Homo sapiens
  SITE (29): Xaa equals any of the naturally occurring L-amino acids
  SITE (75): Xaa equals any of the naturally occurring L-amino acids
  SITE (90): Xaa equals any of the naturally occurring L-amino acids
  SITE (111): Xaa equals any of the naturally occurring L-amino acids
  SITE (119): Xaa equals any of the naturally occurring L-amino acids
  SITE (122): Xaa equals any of the naturally occurring L-amino acids
HEGEIAVLASGARRLELLRPRGNRSGTPXGGEASRSLRDTKAPATRWLQLGRGRQDDGSGFGSVTRRPEGAGPAXSARAPALADRDLRPXMGKKAEARAPILFGEKQASLXSFGIRKFXTWXKWCVV

SEQ ID NO: 1839 - protein, 57 aa, Homo sapiens
  SITE (38): Xaa equals any of the naturally occurring L-amino acids
  SITE (44): Xaa equals any of the naturally occurring L-amino acids
  SITE (48): Xaa equals any of the naturally occurring L-amino acids
  SITE (54): Xaa equals any of the naturally occurring L-amino acids
ARACSSHWCDSSIPFARNGPQLLLRHWWLLHVRRLLQXQRVQMXLLQXELLFLXPRG

SEQ ID NO: 1840 - protein, 33 aa, Homo sapiens
  SITE (10): Xaa equals any of the naturally occurring L-amino acids
  SITE (18): Xaa equals any of the naturally occurring L-amino acids
  SITE (30): Xaa equals any of the naturally occurring L-amino acids
  SITE (33): Xaa equals any of the naturally occurring L-amino acids
QQHRRGSREXPALLAPRXGISFTKPTRLWXPRX

SEQ ID NO: 1841 - protein, 85 aa, Homo sapiens
  SITE (8): Xaa equals any of the naturally occurring L-amino acids
  SITE (12): Xaa equals any of the naturally occurring L-amino acids
ARGQSAWXTALXPWYCMHAMLAAPFPSWAPRVSPDPGSQVCSHLHLPHSPPLPSSRHLHAHLVLSHRPQKGGHEGTSLAELGGAG

SEQ ID NO: 1842 - protein, 64 aa, Homo sapiens
HATCNSLHDPFCIFKPKLSASVAFQGNKESNCGLDFVSFFQNLSFIQFPSIIIYFYLEVSKEVF

SEQ ID NO: 1843 - protein, 73 aa, Homo sapiens
  SITE (12): Xaa equals any of the naturally occurring L-amino acids
  SITE (44): Xaa equals any of the naturally occurring L-amino acids
  SITE (55): Xaa equals any of the naturally occurring L-amino acids
  SITE (56): Xaa equals any of the naturally occurring L-amino acids
  SITE (70): Xaa equals any of the naturally occurring L-amino acids
SWCFSEIIYIFXSQGLTVSPRLEAEVVARAEFDIKLIDTVDLEXGARYPIRPISXXVLQFTGPSFLKRGXLGK

SEQ ID NO: 1844 - protein, 73 aa, Homo sapiens
  SITE (7): Xaa equals any of the naturally occurring L-amino acids
  SITE (21): Xaa equals any of the naturally occurring L-amino acids
  SITE (25): Xaa equals any of the naturally occurring L-amino acids
  SITE (28): Xaa equals any of the naturally occurring L-amino acids
  SITE (31): Xaa equals any of the naturally occurring L-amino acids
  SITE (60): Xaa equals any of the naturally occurring L-amino acids
  SITE (64): Xaa equals any of the naturally occurring L-amino acids
  SITE (68): Xaa equals any of the naturally occurring L-amino acids
  SITE (69): Xaa equals any of the naturally occurring L-amino acids
RGRGWRXVLLGWEGTSPRTQXGKGXRPXGEXTDMSLEDPFFVVRGEVQKAVNTGPRAVPXLVRXPARXXGVRN

SEQ ID NO: 1845 - protein, 67 aa, Homo sapiens
  SITE (8): Xaa equals any of the naturally occurring L-amino acids
  SITE (21): Xaa equals any of the naturally occurring L-amino acids
  SITE (22): Xaa equals any of the naturally occurring L-amino acids
  SITE (30): Xaa equals any of the naturally occurring L-amino acids
  SITE (43): Xaa equals any of the naturally occurring L-amino acids
  SITE (64): Xaa equals any of the naturally occurring L-amino acids
AEGQSNLXMSGWFWTATPAGXXPRSSCTTXKVASSPKHSFPLXSPSNPEALWCALCPMHSHLSXPPG

SEQ ID NO: 1846 - protein, 45 aa, Homo sapiens
  SITE (1): Xaa equals any of the naturally occurring L-amino acids
  SITE (17): Xaa equals any of the naturally occurring L-amino acids
XVQTPSLLGTGVRGRLXFVEKPPVKASGGSPCCIVCLLSFPLVRR

SEQ ID NO: 1847 - protein, 77 aa, Homo sapiens
  SITE (3): Xaa equals any of the naturally occurring L-amino acids
  SITE (14): Xaa equals any of the naturally occurring L-amino acids
  SITE (18): Xaa equals any of the naturally occurring L-amino acids
  SITE (22): Xaa equals any of the naturally occurring L-amino acids
  SITE (23): Xaa equals any of the naturally occurring L-amino acids
  SITE (32): Xaa equals any of the naturally occurring L-amino acids
  SITE (38): Xaa equals any of the naturally occurring L-amino acids
  SITE (53): Xaa equals any of the naturally occurring L-amino acids
  SITE (74): Xaa equals any of the naturally occurring L-amino acids
  SITE (75): Xaa equals any of the naturally occurring L-amino acids
  SITE (76): Xaa equals any of the naturally occurring L-amino acids
EQXKEHTRICSKIXGRFXGRGXXPTEPGDMLXVQDKNXRLTFKFGHRTLLNPXGNLTGKPKEEQVFWTLGKKPXXXE

SEQ ID NO: 1848 - protein, 31 aa, Homo sapiens
  SITE (26): Xaa equals any of the naturally occurring L-amino acids
  SITE (27): Xaa equals any of the naturally occurring L-amino acids
  SITE (31): Xaa equals any of the naturally occurring L-amino acids
ARAHTHPRTGFVKKKKKKKKKKKKKXXGGAX

SEQ ID NO: 1849 - protein, 58 aa, Homo sapiens
  SITE (26): Xaa equals any of the naturally occurring L-amino acids
WPAVTGFKTGLFLVKMGELLSCQKCXRSTWKTKSSQRESKEHLISLISTCSYFSKVNS

SEQ ID NO: 1850 - protein, 69 aa, Homo sapiens
AIHLPTPLFFKTSFNSLNKIGFVFNFYSLFIESQLPLYIICYWKRFLSNLQSLIVPHRVGQWLLELEGP

SEQ ID NO: 1851 - protein, 166 aa, Homo sapiens
  SITE (98): Xaa equals any of the naturally occurring L-amino acids
  SITE (107): Xaa equals any of the naturally occurring L-amino acids
  SITE (109): Xaa equals any of the naturally occurring L-amino acids
  SITE (111): Xaa equals any of the naturally occurring L-amino acids
  SITE (122): Xaa equals any of the naturally occurring L-amino acids
  SITE (134): Xaa equals any of the naturally occurring L-amino acids
  SITE (144): Xaa equals any of the naturally occurring L-amino acids
  SITE (146): Xaa equals any of the naturally occurring L-amino acids
  SITE (150): Xaa equals any of the naturally occurring L-amino acids
  SITE (154): Xaa equals any of the naturally occurring L-amino acids
MWKVDWDPVVSHPKPAFREGLQTQNVNPASPLSQNCGLVPGRGGGWGGAGGKFRFWRAPCGDAPSCALLFPRWSPRSPSGSACPALKRHPPFHPVSGXGCGSGRHAXPXCXVFEQAKAPTGXGRAGVKTVKWLXLNIPLWRNFXKXNSKXSFWXNENGQVRLVKNF

SEQ ID NO: 1852 - protein, 74 aa, Homo sapiens
DPRVRGARSVVLLLVAVRLHTLLSCPLEQPAGTEWILEEGVTTGPPRKPRADIYNLRSPDEFIVGQNQALIEPG

SEQ ID NO: 1853 - protein, 100 aa, Homo sapiens
  SITE (46): Xaa equals any of the naturally occurring L-amino acids
  SITE (47): Xaa equals any of the naturally occurring L-amino acids
  SITE (82): Xaa equals any of the naturally occurring L-amino acids
HRGECFSCVAPRAQSSCHRRHPGFGGAGLQAPGRRTPRATKSSLEXXASYAGGRGGGPDFGSRGLTGLVRPVWLLLWKQCCXLLEDKRESKPLVGEIWLR

SEQ ID NO: 1854 - protein, 125 aa, Homo sapiens
  SITE (2): Xaa equals any of the naturally occurring L-amino acids
  SITE (91): Xaa equals any of the naturally occurring L-amino acids
  SITE (99): Xaa equals any of the naturally occurring L-amino acids
  SITE (103): Xaa equals any of the naturally occurring L-amino acids
  SITE (104): Xaa equals any of the naturally occurring L-amino acids
  SITE (109): Xaa equals any of the naturally occurring L-amino acids
  SITE (122): Xaa equals any of the naturally occurring L-amino acids
RXAGAGGPVRGLLVGLVRQQRLRLRSGAQQPHHAARHPDPQLCRRGRRRLLPQSAAAAAAGPGAPRAAPAPPSATLPAGAAAPPSPPFSFXLPRRPCPXRPCXXAAPKXPGIRCSERESNLXRVP

SEQ ID NO: 1855 - protein, 85 aa, Homo sapiens
  SITE (38): Xaa equals any of the naturally occurring L-amino acids
  SITE (49): Xaa equals any of the naturally occurring L-amino acids
  SITE (51): Xaa equals any of the naturally occurring L-amino acids
  SITE (69): Xaa equals any of the naturally occurring L-amino acids
VGSACLLNWYQPLPLPSKFLVPPLRNSRIVLQIDNARXAADELPNQVSXSXLGAAEARTGVGVGGFRNXPSPSLDGLKLNPPMDS

SEQ ID NO: 1856 - protein, 44 aa, Homo sapiens
  SITE (19): Xaa equals any of the naturally occurring L-amino acids
  SITE (21): Xaa equals any of the naturally occurring L-amino acids
  SITE (26): Xaa equals any of the naturally occurring L-amino acids
  SITE (34): Xaa equals any of the naturally occurring L-amino acids
  SITE (38): Xaa equals any of the naturally occurring L-amino acids
YQQITSSSRLSIQLILISXDXNVTQXLLIAPNKXVSVXPLPSEL

SEQ ID NO: 1857 - protein, 76 aa, Homo sapiens
  SITE (23): Xaa equals any of the naturally occurring L-amino acids
  SITE (27): Xaa equals any of the naturally occurring L-amino acids
  SITE (31): Xaa equals any of the naturally occurring L-amino acids
  SITE (32): Xaa equals any of the naturally occurring L-amino acids
  SITE (39): Xaa equals any of the naturally occurring L-amino acids
  SITE (41): Xaa equals any of the naturally occurring L-amino acids
  SITE (56): Xaa equals any of the naturally occurring L-amino acids
  SITE (64): Xaa equals any of the naturally occurring L-amino acids
STHASGFSAPSRISAWFGPPASXPASXMSIXXTQKSYKXSXSGPRGFSSRSYTSGXGSRISSSXFSRVGSSNFRGG

SEQ ID NO: 1858 - protein, 83 aa, Homo sapiens
  SITE (71): Xaa equals any of the naturally occurring L-amino acids
  SITE (75): Xaa equals any of the naturally occurring L-amino acids
RLRTKTCTWSFPGALCVVELRWNFGALGCQRACLVATETSPARLRGHFITIQKCLPLKASVVVFKPQKSHXQDHXTTTLTSVP

SEQ ID NO: 1859 - protein, 58 aa, Homo sapiens
  SITE (10): Xaa equals any of the naturally occurring L-amino acids
  SITE (12): Xaa equals any of the naturally occurring L-amino acids
  SITE (25): Xaa equals any of the naturally occurring L-amino acids
  SITE (33): Xaa equals any of the naturally occurring L-amino acids
  SITE (40): Xaa equals any of the naturally occurring L-amino acids
  SITE (57): Xaa equals any of the naturally occurring L-amino acids
KSSPGKMGLXEXATGTASCRWSWPXSHRPVYKXCASWTLXSGTGSWTLKSLVPPARXW

SEQ ID NO: 1860 - protein, 61 aa, Homo sapiens
  SITE (45): Xaa equals any of the naturally occurring L-amino acids
  SITE (47): Xaa equals any of the naturally occurring L-amino acids
  SITE (59): Xaa equals any of the naturally occurring L-amino acids
QDQSCRKMDSEVQRDGRILDLIDDAWREDKLPYEDVAIPLNELPXPXQDNGGTTDLSKXKK

SEQ ID NO: 1861 - protein, 71 aa, Homo sapiens
  SITE (61): Xaa equals any of the naturally occurring L-amino acids
SRGAPFFKPVRKAQYSGGSDPIFQVRPSPLSLTRKGNSLTPCASQVRQCSPCFGSHTVRAXTDLCPLSGTP

SEQ ID NO: 1862 - protein, 59 aa, Homo sapiens
  SITE (57): Xaa equals any of the naturally occurring L-amino acids
TPTPFGSARAPQARPGRRDGRMSGGRRKEEPPQPQLANGALKVSVWSKVLRTTRPGXIR

SEQ ID NO: 1863 - protein, 83 aa, Homo sapiens
  SITE (77): Xaa equals any of the naturally occurring L-amino acids
  SITE (83): Xaa equals any of the naturally occurring L-amino acids
QLSTLINWLQSTSPAAGKKGGRSPGRFEAASSNLQFNMKITSELVKRGLTPVFRFTVQCFTQPFYLTPKKKKKKKNXGGGPGX

SEQ ID NO: 1864 - protein, 37 aa, Homo sapiens
EQLKEHTRLCSKIVGRFIGRGDKPTEPGDSWLSKIES

SEQ ID NO: 1865 - protein, 41 aa, Homo sapiens
EQLKEHTRLCSKIVGRFIGRGDKPTEPGDSWLSKIESLVQL

SEQ ID NO: 1866 - protein, 33 aa, Homo sapiens
  SITE (32): Xaa equals any of the naturally occurring L-amino acids
NTELTINSPISTINQQVIITLTVNPTKKKKKXK

SEQ ID NO: 1867 - protein, 143 aa, Homo sapiens
GSGGKMEDHQHVPIDIQTSKLLDWLVDRRHCSLKWQSLVLTIREKINAAIQDMPESEEIAQLLSGSYIHYFHCLRILDLLKGTEASTKNIFGRYSSQRMKDWQEIIALYEKDNTYLVELSSLLVRNVNYEIPSLKKQIAKCQQ

SEQ ID NO: 1868 - protein, 37 aa, Homo sapiens
EQLKEHTRLCSKIVGRFIGRGDKPTEPGDSWLSKIVS

SEQ ID NO: 1869 - protein, 57 aa, Homo sapiens [sequence omitted]

SEQ ID NO: 1870 - protein, 63 aa, Homo sapiens
VPHSELLQPASRICSMSRRSQSLAASSVPGERCLELSSQGVMSASRVCMGAEGTLLLPPWSGN

SEQ ID NO: 1871 - protein, 70 aa, Homo sapiens
  SITE (19): Xaa equals any of the naturally occurring L-amino acids
  SITE (62): Xaa equals any of the naturally occurring L-amino acids
  SITE (63): Xaa equals any of the naturally occurring L-amino acids
  SITE (68): Xaa equals any of the naturally occurring L-amino acids
TWCHEVGELGELSHSSYRXAFLKCPLTSRFCSRSSFSELKVIFIYVWGKINSSSKRILIRLXXLLKTXPN

SEQ ID NO: 1872 - protein, 47 aa, Homo sapiens
  SITE (45): Xaa equals any of the naturally occurring L-amino acids
ETWHLNHILSLGKSFGLCSCFVCFTCFPPSPKPFVLSVKLTFPFXFL

SEQ ID NO: 1873 - protein, 75 aa, Homo sapiens
KTLLLWNMKLCVRWRDPLNLRALNSPESTLGRFAMELKLEVIFLGALESFLGTQNYQKSGTVRRKSVCKTGFLEV

SEQ ID NO: 1874 - protein, 107 aa, Homo sapiens
INNISRQIYLTDNPEAVAIKLNQTALQAVTPITSFGKKQESSCPSQNLKNSEMENENDKIVPKATASLPEAEELIAPGTPIQFDIVLPATEFLDQNRGSRRTNPFGE

SEQ ID NO: 1875 - protein, 84 aa, Homo sapiens
  SITE (33): Xaa equals any of the naturally occurring L-amino acids
  SITE (34): Xaa equals any of the naturally occurring L-amino acids
GEEACFAVGSLVLARSLRVCTGGTLPLPAPFLXXPVGNIHLFMPVCCMQAFWLPTLQQNELHQLLSADSAHRESWSHSLFCFAL

SEQ ID NO: 1876 - protein, 65 aa, Homo sapiens
  SITE (6): Xaa equals any of the naturally occurring L-amino acids
  SITE (16): Xaa equals any of the naturally occurring L-amino acids
  SITE (37): Xaa equals any of the naturally occurring L-amino acids
  SITE (40): Xaa equals any of the naturally occurring L-amino acids
  SITE (41): Xaa equals any of the naturally occurring L-amino acids
QWGFVXDKMAMAGRVXPPSYDERPFHRPVTELREDKXSEXXGPASLLLTRPVPKKYVFQNALNLN

SEQ ID NO: 1877 - protein, 58 aa, Homo sapiens
  SITE (7): Xaa equals any of the naturally occurring L-amino acids
  SITE (47): Xaa equals any of the naturally occurring L-amino acids
  SITE (51): Xaa equals any of the naturally occurring L-amino acids
  SITE (52): Xaa equals any of the naturally occurring L-amino acids
  SITE (55): Xaa equals any of the naturally occurring L-amino acids
RAPPGQXGGDHQDFIQGGRDQEIKPPTLSVHTGLCDYIDQPLKIKQXLICXXDKXKIS

SEQ ID NO: 1878 - protein, 45 aa, Homo sapiens
  SITE (31): Xaa equals any of the naturally occurring L-amino acids
  SITE (39): Xaa equals any of the naturally occurring L-amino acids
  SITE (45): Xaa equals any of the naturally occurring L-amino acids
ALDWLPEGLVKIHSHPAGSGSNRGFHSFISXLADKDPGXHVLLIX

SEQ ID NO: 1879 - protein, 54 aa, Homo sapiens
VKMIIGPKLTALPKRQRSQDIGRSGAALETLKFTSMRGLECSLGRRASTCSPGP

SEQ ID NO: 1880 - protein, 77 aa, Homo sapiens
SACGSPGGNFPSPRGGSGVASMERAESSSTEPAKAIKPIDQKSVHQICSGQVVLSLSTAVKELVENSLDAGATNIDL

SEQ ID NO: 1881 - DNA, 733 bp, Homo sapiens
gggatccggagcccaaatcttctgacaaaactcacacatgcccaccgtgcccagcacctgaattcgagggtgcaccgtcagtcttcctcttccccccaaaacccaaggacaccctcatgatctcccggactcctgaggtcacatgcgtggtggtggacgtaagccacgaagaccctgaggtcaagttcaactggtacgtggacggcgtggaggtgcataatgccaagacaaagccgcgggaggagcagtacaacagcacgtaccgtgtggtcagcgtcctcaccgtcctgcaccaggactggctgaatggcaaggagtacaagtgcaaggtctccaacaaagccctcccaacccccatcgagaaaaccatctccaaagccaaagggcagccccgagaaccacaggtgtacaccctgcccccatcccgggatgagctgaccaagaaccaggtcagcctgacctgcctggtcaaaggcttctatccaagcgacatcgccgtggagtgggagagcaatgggcagccggagaacaactacaagaccacgcctcccgtgctggactccgacggctccttcttcctctacagcaagctcaccgtggacaagagcaggtggcagcaggggaacgtcttctcatgctccgtgatgcatgaggctctgcacaaccactacacgcagaagagcctctccctgtctccgggtaaatgagtgcgacggccgcgactctagaggat

SEQ ID NO: 1882 - protein, 5 aa, Homo sapiens
  SITE (3): Xaa equals any of the naturally occurring L-amino acids
WSXWS

SEQ ID NO: 1883 - DNA, 86 bp, Homo sapiens
gcgcctcgagatttccccgaaatctagatttccccgaaatgatttccccgaaatgatttccccgaaatatctgccatctcaattag

SEQ ID NO: 1884 - DNA, 27 bp, Homo sapiens
gcggcaagctttttgcaaagcctaggc

SEQ ID NO: 1885 - DNA, 271 bp, Homo sapiens
ctcgagatttccccgaaatctagatttccccgaaatgatttccccgaaatgatttccccgaaatatctgccatctcaattagtcagcaaccatagtcccgcccctaactccgcccatcccgcccctaactccgcccagttccgcccattctccgccccatggctgactaattttttttatttatgcagaggccgaggccgcctcggcctctgagctattccagaagtagtgaggaggcttttttggaggcctaggcttttgcaaaaagctt

SEQ ID NO: 1886 - DNA, 32 bp, Homo sapiens
gcgctcgagggatgacagcgatagaaccccgg

SEQ ID NO: 1887 - DNA, 31 bp, Homo sapiens
gcgaagcttcgcgactccccggatccgcctc

SEQ ID NO: 1888 - DNA, 12 bp, Homo sapiens
ggggactttccc

SEQ ID NO: 1889 - DNA, 73 bp, Homo sapiens
gcggcctcgaggggactttcccggggactttccggggactttccgggactttccatcctgccatctcaattag

SEQ ID NO: 1890 - DNA, 256 bp, Homo sapiens
ctcgaggggactttcccggggactttccggggactttccgggactttccatctgccatctcaattagtcagcaaccatagtcccgcccctaactccgcccatcccgcccctaactccgcccagttccgcccattctccgccccatggctgactaattttttttatttatgcagaggccgaggccgcctcggcctctgagctattccagaagtagtgaggaggcttttttggaggcctaggcttttgcaaaaagctt

What is claimed is:

1. An isolated nucleic acid molecule comprising a polynucleotide having a nucleotide sequence at least 95% identical to a sequence selected from the group consisting of:
(a) a polynucleotide fragment of SEQ ID NO:X or a polynucleotide fragment of the cDNA sequence included in the related cDNA clone, which is hybridizable to SEQ ID NO:X;
(b) a polynucleotide encoding a polypeptide fragment of SEQ ID NO:Y or a polypeptide fragment encoded by the cDNA sequence included in the related cDNA clone, which is hybridizable to SEQ ID NO:X;
(c) a polynucleotide encoding a polypeptide fragment of a polypeptide encoded by SEQ ID NO:X or a polypeptide fragment encoded by the cDNA sequence included in the related cDNA clone, which is hybridizable to SEQ ID NO:X;
(d) a polynucleotide encoding a polypeptide domain of SEQ ID NO:Y or a polypeptide domain encoded by the cDNA sequence included in the related cDNA clone, which is hybridizable to SEQ ID NO:X;
(e) a polynucleotide encoding a polypeptide epitope of SEQ ID NO:Y or a polypeptide epitope encoded by the cDNA sequence included in the related cDNA clone, which is hybridizable to SEQ ID NO:X;
(f) a polynucleotide encoding a polypeptide of SEQ ID NO:Y or the cDNA sequence included in the related cDNA clone, which is hybridizable to SEQ ID NO:X, having biological activity;
(g) a polynucleotide which is a variant of SEQ ID NO:X;
(h) a polynucleotide which is an allelic variant of SEQ ID NO:X;
(i) a polynucleotide which encodes a species homologue of the SEQ ID NO:Y;
(j) a polynucleotide capable of hybridizing under stringent conditions to any one of the polynucleotides specified in (a)-(i), wherein said polynucleotide does not hybridize under stringent conditions to a nucleic acid molecule having a nucleotide sequence of only A residues or of only T residues.

2. The isolated nucleic acid molecule of claim 1, wherein the polynucleotide fragment comprises a nucleotide sequence encoding a protein.

3. The isolated nucleic acid molecule of claim 1, wherein the polynucleotide fragment comprises a nucleotide sequence encoding the sequence identified as SEQ ID NO:Y or the polypeptide encoded by the cDNA sequence included in the related cDNA clone, which is hybridizable to SEQ ID NO:X.

4. The isolated nucleic acid molecule of claim 1, wherein the polynucleotide fragment comprises the entire nucleotide sequence of SEQ ID NO:X or the cDNA sequence included in the related cDNA clone, which is hybridizable to SEQ ID NO:X.

5. The isolated nucleic acid molecule of claim 2, wherein the nucleotide sequence comprises sequential nucleotide deletions from either the C-terminus or the N-terminus.

6. The isolated nucleic acid molecule of claim 3, wherein the nucleotide sequence comprises sequential nucleotide deletions from either the C-terminus or the N-terminus.

7. A recombinant vector comprising the isolated nucleic acid molecule of claim 1.

8. A method of making a recombinant host cell comprising the isolated nucleic acid molecule of claim 1.

9. A recombinant host cell produced by the method of claim 8.

10. The recombinant host cell of claim 9 comprising vector sequences.

11. An isolated polypeptide comprising an amino acid sequence at least 95% identical to a sequence selected from the group consisting of:
(a) a polypeptide fragment of SEQ ID NO:Y or of the sequence encoded by the cDNA included in the related cDNA clone;
(b) a polypeptide fragment of SEQ ID NO:Y or of the sequence encoded by the cDNA included in the related cDNA clone, having biological activity;
(c) a polypeptide domain of SEQ ID NO:Y or of the sequence encoded by the cDNA included in the related cDNA clone;
(d) a polypeptide epitope of SEQ ID NO:Y or of the sequence encoded by the cDNA included in the related cDNA clone;
(e) a full length protein of SEQ ID NO:Y or of the sequence encoded by the cDNA included in the related cDNA clone;
(f) a variant of SEQ ID NO:Y;
(g) an allelic variant of SEQ ID NO:Y; or
(h) a species homologue of the SEQ ID NO:Y.

12. The isolated polypeptide of claim 11, wherein the full length protein comprises sequential amino acid deletions from either the C-terminus or the N-terminus.

13. An isolated antibody that binds specifically to the isolated polypeptide of claim 11.

14. A recombinant host cell that expresses the isolated polypeptide of claim 11.

15. A method of making an isolated polypeptide comprising:
(a) culturing the recombinant host cell of claim 14 under conditions such that said polypeptide is expressed; and
(b) recovering said polypeptide.

16. The polypeptide produced by claim 15.

17. A method for preventing, treating, or ameliorating a medical condition, comprising administering to a mammalian subject a therapeutically effective amount of the polypeptide of claim 11 or the polynucleotide of claim 1.

18. A method of diagnosing a pathological condition or a susceptibility to a pathological condition in a subject comprising:
(a) determining the presence or absence of a mutation in the polynucleotide of claim 1; and
(b) diagnosing a pathological condition or a susceptibility to a pathological condition based on the presence or absence of said mutation.

19. A method of diagnosing a pathological condition or a susceptibility to a pathological condition in a subject comprising:
(a) determining the presence or amount of expression of the polypeptide of claim 11 in a biological sample; and
(b) diagnosing a pathological condition or a susceptibility to a pathological condition based on the presence or amount of expression of the polypeptide.

20. A method for identifying a binding partner to the polypeptide of claim 11 comprising:
(a) contacting the polypeptide of claim 11 with a binding partner; and
(b) determining whether the binding partner effects an activity of the polypeptide.

21. The gene corresponding to the cDNA sequence of SEQ ID NO:Y.

22. A method of identifying an activity in a biological assay, wherein the method comprises:
(a) expressing SEQ ID NO:X in a cell;
(b) isolating the supernatant;
(c) detecting an activity in a biological assay; and
(d) identifying the protein in the supernatant having the activity.

23. The product produced by the method of claim 20.
